(19) United States
(12) Patent Application Publication
(10) Pub. No.: US 2025/0049846 A1
(43) Pub. Date: Feb. 13, 2025

(54) METHODS AND COMPOSITIONS FOR TREATING CANCER WITH IMMUNE CELLS

(71) Applicant: Palleon Pharmaceuticals Inc., Waltham, MA (US)

(72) Inventors: Ahmed Alkhateeb, Cambridge, MA (US); Karl D. Normington, Prides Crossing, MA (US); Li Peng, Lexington, MA (US); James W. Broderick, Wellesley, MA (US); Zakir B. Siddiquee, Cambridge, MA (US); Jenny Che, Ashland, MA (US); Weiguo Yao, Auburndale, MA (US); Abhishek Das, Wayland, MA (US)

(21) Appl. No.: 17/417,513

(22) PCT Filed: Jan. 3, 2020
(86) PCT No.: PCT/US2020/012240

§ 371 Date: Jun. 23, 2021

Related U.S. Application Data
(60) Provisional application No. 62/787,935, filed on Jan. 3, 2019.

(51) Int. Cl. A61K 35/17; A61K 39/00; A61P 35/00; C12N 5/0783; C12N 9/24

(52) U.S. Cl. CPC A61K 35/17; A61K 39/4611; A61K 39/4631; A61K 39/464412; A61K 39/464468; A61P 35/00; C12N 5/0636; C12N 9/2402; A61K 2239/13; C12N 2510/00; C12Y 302/01018

(57) ABSTRACT

The invention provides compositions and methods for treating a patient with cancer with an immune cell, e.g., a T-cell, e.g., an engineered T-cell, with increased sialidase activity. The invention also provides compositions and methods for treating a patient with cancer with an immune cell, e.g., a T-cell, e.g., an engineered T-cell, in combination with a sialidase. The invention also provides compositions and methods for treating a patient with cancer with an immune cell, e.g., a T-cell, e.g., an engineered T-cell, pretreated with a sialidase.

### CROSS REFERENCE TO RELATED APPLICATION

[0001] This application is a § 371 National Stage of International (PCT) Patent Application Serial No. PCT/US2020/012240, filed on Jan. 3, 2020, which claims the benefit of, and priority to, U.S. Provisional Patent Application No. 62/787,935, filed on Jan. 3, 2019, the disclosures of each of which are hereby incorporated by reference herein in their entirety for all purposes.

### SEQUENCE LISTING

[0002] The instant application contains a Sequence Listing which has been submitted electronically in ASCII format and is hereby incorporated by reference in its entirety. Said ASCII copy, created on Aug. 19, 2021, is named PAL-010WOUS_SL.txt and is 701,920 bytes in size.

### FIELD OF THE INVENTION

[0003] The invention relates generally to compositions and methods for treating cancer in a subject, and, more particularly, the invention relates to immune cells with increased sialidase activity or pharmaceutical compositions containing such immune cells and their use in the treatment of cancer.

### BACKGROUND

[0004] According to the American Cancer Society, more than one million people in the United States are diagnosed with cancer each year. Cancer is a disease that results from uncontrolled proliferation of cells that were once subject to natural control mechanisms but have been transformed into cancerous cells that continue to proliferate in an uncontrolled manner.

[0005] A growing body of evidence supports roles for glycans, and sialoglycans in particular, at various pathophysiological steps of tumor progression. Glycans regulate tumor proliferation, invasion, hematogenous metastasis and angiogenesis (Fuster et al. (2005) NAT. REV. CANCER 5(7): 526-42). The sialylation of cell surface glycoconjugates is frequently altered in cancers, resulting in the expression of sialylated tumor-associated carbohydrate antigens. The expression of sialylated glycans by tumor cells is often associated with increased aggressiveness and metastatic potential of a tumor.

[0006] Chimeric antigen receptors (CARs) are synthetic receptors that retarget immune cells, e.g., T cells, to tumor surface antigens (Sadelain et al. (2003), NAT. REV. CANCER. 3(1):35-45, Sadelain et al. (2013) CANCER DISCOVERY 3(4):388-398). CARs provide both antigen binding and immune cell activation functions. Initially, CARs contained an antibody-based tumor-binding element, such as a single chain Fv (scFv), that is responsible for antigen recognition linked to either CD3zeta or Fc receptor signaling domains, which trigger T-cell activation. Later CAR constructs included additional activating and costimulatory signaling domains which have led to encouraging results in patients with chemorefractory B-cell malignancies (Brentjens et al. (2013) SCI. TRANS. MED. 5(177): 177ra38, Brentjens et al. (2011) BLOOD 118(18): 4817-4828, Davila et al. (2014) SCI. TRANS. MED. 6(224): 224ra25, Grupp et al. (2013) N. ENGL. J. MED. 368(16): 1509-1518, Kalos et al. (2011) SCI. TRANS. MED. 3(95): 95ra73).

[0007] Despite the significant advances being made in cancer treatment and management, there is still an ongoing need for new and effective therapies for treating and managing cancer.

### SUMMARY OF THE INVENTION

[0008] The present invention provides methods and compositions for treating cancer in a subject. The invention is based, in part, upon the discovery that an anti-cancer treatment using an immune cell, e.g., a T-cell, e.g., a CAR T-cell, can be enhanced when the activity of a sialidase is introduced into, up regulated, or otherwise increased in the immune cell. Additionally, an anti-cancer treatment using an immune cell, e.g., a T-cell, e.g., a CAR T-cell, can be enhanced when the immune cell is administered in combination with a sialidase, or is pretreated with a sialidase before administration to a subject. It is contemplated that the sialidase removes sialic acid and/or sialic acid containing molecules from the surface of cancer cells, immune cells, and/or other molecules in the tumor microenvironment, thereby reducing immune inhibition mediated by the sialic acid and/or sialic acid containing molecules.

[0009] Accordingly, in one aspect, the invention provides an isolated immune cell modified to have increased sialidase activity relative to a similar or identical cell that has not been modified. In certain embodiments, the immune cell comprises an exogenous nucleotide sequence encoding a sialidase.

[0010] In certain embodiments, the sialidase is a eukaryotic sialidase, e.g., a mammalian sialidase, e.g., a human sialidase, e.g., Neu1, Neu2, Neu3, or Neu4. In certain embodiments, the sialidase comprises an amino acid sequence selected from SEQ ID NO: 1, SEQ ID NO: 2, SEQ ID NO: 3, SEQ ID NO: 4, SEQ ID NO: 5, and SEQ ID NO: 6.

[0011] In certain embodiments, the sialidase is a prokaryotic sialidase, e.g., a Salmonella typhimurium sialidase or a Vibrio cholera sialidase. In certain embodiments, the sialidase comprises an amino acid sequence selected from SEQ ID NO: 7 and SEQ ID NO: 8.

[0012] In certain embodiments, the sialidase is a wild-type sialidase. In certain embodiments, the sialidase is a mutant sialidase, e.g., the sialidase comprises an amino acid sequence selected from SEQ ID NO: 36, SEQ ID NO: 37, SEQ ID NO: 38, SEQ ID NO: 39, SEQ ID NO: 63, SEQ ID NO: 64, SEQ ID NO: 65, SEQ ID NO: 66, SEQ ID NO: 83, SEQ ID NO: 84, SEQ ID NO: 85, SEQ ID NO: 86, SEQ ID NO: 87, SEQ ID NO: 88, and SEQ ID NO: 89. In certain embodiments, the sialidase can cleave α2,3, α2,6, and/or α2,8 linkages.

[0013] In certain embodiments, the isolated immune cell is selected from a T-cell, a Tumor Infiltrating Lymphocyte (TIL), and a natural killer (NK) cell.

[0014] In certain embodiments, the isolated immune cell is engineered to express a chimeric antigen receptor (CAR), e.g., the isolated immune cell comprises an exogenous nucleotide sequence encoding a CAR. In certain embodiments, the CAR binds a cancer antigen, for example, a cancer antigen selected from mesothelin, prostate specific membrane antigen (PSMA), prostate stem cell antigen (PCSA), carbonic anhydrase IX (CAIX), carcinoembryonic antigen (CEA), CD5, CD7, CD10, CD19, CD20, CD22, CD30, CD33, CD34, CD38, CD41, CD44, CD47, CD49f, CD56, CD74, CD123, CD133, CD138, epithelial glycoprotein2 (EGP 2), epithelial glycoprotein-40 (EGP-40), epithelial cell adhesion molecule (EpCAM), folate-binding protein (FBP), fetal acetylcholine receptor (AChR), folate receptor-α and β (FRa and β), Ganglioside G2 (GD2), Ganglioside G3 (GD3), an Epidermal Growth Factor Receptor (EGFR), Epidermal Growth Factor Receptor 2 (HER-2/ERB2), Epidermal Growth Factor Receptor vIII (EGFRvIII), ERB3, ERB4, human telomerase reverse transcriptase (hTERT), Interleukin-13 receptor subunit alpha-2 (IL-13Ra2), K-light chain, kinase insert domain receptor (KDR), Lewis A (CA19.9), Lewis Y (LeY), LI cell adhesion molecule (LICAM), melanoma-associated antigen 1 (melanoma antigen family A1, MAGE-A1), Mucin 16 (MUC-16), Mucin 1 (MUC-1), KG2D ligands, cancer-testis antigen NY-ESO-1, oncofetal antigen (h5T4), tumor-associated glycoprotein 72 (TAG-72), vascular endothelial growth factor R2 (VEGF-R2), Wilms tumor protein (WT-1), type 1 tyrosine-protein kinase transmembrane receptor (ROR1), B7-H3 (CD276), B7-H6 (Nkp30), Chondroitin sulfate proteoglycan-4 (CSPG4), DNAX Accessory Molecule (DNAM-1), Ephrin type A Receptor 2 (EpHA2), Fibroblast Associated Protein (FAP), Gp100/HLA-A2, Glypican 3 (GPC3), HA-IH, HERK-V, IL-1 IRa, Latent Membrane Protein 1 (LMP1), Neural cell-adhesion molecule (N-CAM/CD56), programmed cell death receptor ligand 1 (PD-L1), B Cell Maturation Antigen (BCMA), and Trail Receptor (TRAIL R).

[0015] In another aspect, the invention also provides a pharmaceutical composition comprising any of the foregoing isolated immune cells and a pharmaceutically acceptable carrier or diluent.

[0016] In another aspect, the invention provides a pharmaceutical composition comprising: (a) an isolated immune cell; (b) a sialidase; and (c) a pharmaceutically acceptable carrier or diluent.

[0017] In another aspect, the invention provides a pharmaceutical composition comprising: (a) an isolated immune cell pretreated with a sialidase; and (b) a pharmaceutically acceptable carrier or diluent.

[0018] In certain embodiments, the sialidase is a eukaryotic sialidase, e.g., a mammalian sialidase, e.g., a human sialidase, e.g., Neu1, Neu2, Neu3, or Neu4. In certain embodiments, the sialidase comprises an amino acid sequence selected from SEQ ID NO: 1, SEQ ID NO: 2, SEQ ID NO: 3, SEQ ID NO: 4, SEQ ID NO: 5, and SEQ ID NO: 6.

[0019] In certain embodiments, the sialidase is a prokaryotic sialidase, e.g., a Salmonella typhimurium sialidase or a Vibrio cholera sialidase. In certain embodiments, the sialidase comprises an amino acid sequence selected from SEQ ID NO: 7 and SEQ ID NO: 8.

[0020] In certain embodiments, the sialidase is a wild-type sialidase. In certain embodiments, the sialidase is a mutant sialidase, e.g., the sialidase comprises an amino acid sequence selected from SEQ ID NO: 36, SEQ ID NO: 37, SEQ ID NO: 38, SEQ ID NO: 39, SEQ ID NO: 63, SEQ ID NO: 64, SEQ ID NO: 65, SEQ ID NO: 66, SEQ ID NO: 83, SEQ ID NO: 84, SEQ ID NO: 85, SEQ ID NO: 86, SEQ ID NO: 87, SEQ ID NO: 88, and SEQ ID NO: 89. In certain embodiments, the sialidase can cleave α2,3, α2,6, and/or α2,8 linkages.

[0021] In certain embodiments, the isolated immune cell is selected from a T-cell, a Tumor Infiltrating Lymphocyte (TIL), and a natural killer (NK) cell.

[0022] In certain embodiments, the isolated immune cell is engineered to express a chimeric antigen receptor (CAR), e.g., the isolated immune cell comprises an exogenous nucleotide sequence encoding a CAR. In certain embodiments, the CAR binds a cancer antigen, for example, a cancer antigen selected from mesothelin, prostate specific membrane antigen (PSMA), prostate stem cell antigen (PCSA), carbonic anhydrase IX (CAIX), carcinoembryonic antigen (CEA), CD5, CD7, CD10, CD19, CD20, CD22, CD30, CD33, CD34, CD38, CD41, CD44, CD47, CD49f, CD56, CD74, CD123, CD133, CD138, epithelial glycoprotein2 (EGP 2), epithelial glycoprotein-40 (EGP-40), epithelial cell adhesion molecule (EpCAM), folate-binding protein (FBP), fetal acetylcholine receptor (AChR), folate receptor-α and β (FRa and β), Ganglioside G2 (GD2), Ganglioside G3 (GD3), an Epidermal Growth Factor Receptor (EGFR), Epidermal Growth Factor Receptor 2 (HER-2/ERB2), Epidermal Growth Factor Receptor vIII (EGFRvIII), ERB3, ERB4, human telomerase reverse transcriptase (hTERT), Interleukin-13 receptor subunit alpha-2 (IL-13Ra2), K-light chain, kinase insert domain receptor (KDR), Lewis A (CA19.9), Lewis Y (LeY), LI cell adhesion molecule (LICAM), melanoma-associated antigen 1 (melanoma antigen family A1, MAGE-A1), Mucin 16 (MUC-16), Mucin 1 (MUC-1), KG2D ligands, cancer-testis antigen NY-ESO-1, oncofetal antigen (h5T4), tumor-associated glycoprotein 72 (TAG-72), vascular endothelial growth factor R2 (VEGF-R2), Wilms tumor protein (WT-1), type 1 tyrosine-protein kinase transmembrane receptor (ROR1), B7-H3 (CD276), B7-H6 (Nkp30), Chondroitin sulfate proteoglycan-4 (CSPG4), DNAX Accessory Molecule (DNAM-1), Ephrin type A Receptor 2 (EpHA2), Fibroblast Associated Protein (FAP), Gp100/HLA-A2, Glypican 3 (GPC3), HA-IH, HERK-V, IL-1 IRa, Latent Membrane Protein 1 (LMP1), Neural cell-adhesion molecule (N-CAM/CD56), programmed cell death receptor ligand 1 (PD-L1), B Cell Maturation Antigen (BCMA), and Trail Receptor (TRAIL R).

[0023] In another aspect, the invention provides a method of inhibiting tumor growth in a subject in need thereof, the method comprising administering to the subject an effective amount of any of the foregoing isolated immune cells or pharmaceutical compositions, thereby to inhibit growth of the tumor. In another aspect, the invention provides a method of treating cancer in a subject in need thereof, the method comprising administering to the subject an effective amount of any of the foregoing isolated immune cells or pharmaceutical compositions, thereby to treat the cancer in the subject.

[0024] In another aspect, the invention provides a method of treating cancer in a subject in need thereof, the method comprising administering to the subject an isolated immune cell and a sialidase, thereby to treat the cancer in the subject. The isolated immune cell and the sialidase may, e.g., be administered separately or in combination. The isolated immune cell and the sialidase may, e.g., be administered at the same time or at different times.

[0025] In another aspect, the invention provides a method of treating cancer in a subject in need thereof, the method comprising administering an isolated, sialidase treated immune cell to the subject. The isolated immune cell may, e.g., be substantially sialidase free.

[0026] In another aspect, the invention provides a method of treating cancer in a subject in need thereof, the method comprising: (a) pretreating an isolated immune cell with a sialidase; and (b) administering the isolated immune cell to the subject. The isolated immune cell may, e.g., be purified from the sialidase prior to administration to the subject.

[0027] In certain embodiments, the sialidase is a eukaryotic sialidase, e.g., a mammalian sialidase, e.g., a human sialidase, e.g., Neu1, Neu2, Neu3, or Neu4. In certain embodiments, the sialidase comprises an amino acid sequence selected from SEQ ID NO: 1, SEQ ID NO: 2, SEQ ID NO: 3, SEQ ID NO: 4, SEQ ID NO: 5, and SEQ ID NO: 6.

[0028] In certain embodiments, the sialidase is a prokaryotic sialidase, e.g., a Salmonella typhimurium sialidase or a Vibrio cholera sialidase. In certain embodiments, the sialidase comprises an amino acid sequence selected from SEQ ID NO: 7 and SEQ ID NO: 8.

[0029] In certain embodiments, the sialidase is a wild-type sialidase. In certain embodiments, the sialidase is a mutant sialidase, e.g., the sialidase comprises an amino acid sequence selected from SEQ ID NO: 36, SEQ ID NO: 37, SEQ ID NO: 38, SEQ ID NO: 39, SEQ ID NO: 63, SEQ ID NO: 64, SEQ ID NO: 65, SEQ ID NO: 66, SEQ ID NO: 83, SEQ ID NO: 84, SEQ ID NO: 85, SEQ ID NO: 86, SEQ ID NO: 87, SEQ ID NO: 88, and SEQ ID NO: 89. In certain embodiments, the sialidase can cleave α2,3, α2,6, and/or α2,8 linkages.

[0030] In certain embodiments, the isolated immune cell is selected from a T-cell, a Tumor Infiltrating Lymphocyte (TIL), and a natural killer (NK) cell.

[0031] In certain embodiments, the isolated immune cell is engineered to express a chimeric antigen receptor (CAR), e.g., the isolated immune cell comprises an exogenous nucleotide sequence encoding a CAR. In certain embodiments, the CAR binds a cancer antigen, for example, a cancer antigen selected from mesothelin, prostate specific membrane antigen (PSMA), prostate stem cell antigen (PCSA), carbonic anhydrase IX (CAIX), carcinoembryonic antigen (CEA), CD5, CD7, CD10, CD19, CD20, CD22, CD30, CD33, CD34, CD38, CD41, CD44, CD47, CD49f, CD56, CD74, CD123, CD133, CD138, epithelial glycoprotein2 (EGP 2), epithelial glycoprotein-40 (EGP-40), epithelial cell adhesion molecule (EpCAM), folate-binding protein (FBP), fetal acetylcholine receptor (AChR), folate receptor-α and β (FRa and β), Ganglioside G2 (GD2), Ganglioside G3 (GD3), an Epidermal Growth Factor Receptor (EGFR), Epidermal Growth Factor Receptor 2 (HER-2/ERB2), Epidermal Growth Factor Receptor vIII (EGFRvIII), ERB3, ERB4, human telomerase reverse transcriptase (hTERT), Interleukin-13 receptor subunit alpha-2 (IL-13Ra2), K-light chain, kinase insert domain receptor (KDR), Lewis A (CA19.9), Lewis Y (LeY), LI cell adhesion molecule (LICAM), melanoma-associated antigen 1 (melanoma antigen family A1, MAGE-A1), Mucin 16 (MUC-16), Mucin 1 (MUC-1), KG2D ligands, cancer-testis antigen NY-ESO-1, oncofetal antigen (h5T4), tumor-associated glycoprotein 72 (TAG-72), vascular endothelial growth factor R2 (VEGF-R2), Wilms tumor protein (WT-1), type 1 tyrosine-protein kinase transmembrane receptor (ROR1), B7-H3 (CD276), B7-H6 (Nkp30), Chondroitin sulfate proteoglycan-4 (CSPG4), DNAX Accessory Molecule (DNAM-1), Ephrin type A Receptor 2 (EpHA2), Fibroblast Associated Protein (FAP), Gp100/HLA-A2, Glypican 3 (GPC3), HA-IH, HERK-V, IL-1 IRa, Latent Membrane Protein 1 (LMP1), Neural cell-adhesion molecule (N-CAM/CD56), programmed cell death receptor ligand 1 (PD-L1), B Cell Maturation Antigen (BCMA), and Trail Receptor (TRAIL R).

[0032] In certain embodiments of any of the foregoing methods, the cancer is an adenocarcinoma, a metastatic cancer and/or is a refractory cancer. In certain embodiments of any of the foregoing methods, the cancer is a breast, colon or colorectal, lung, ovarian, pancreatic, prostate, cervical, endometrial, head and neck, liver, renal, skin, stomach, testicular, thyroid or urothelial cancer. In certain embodiments of any of the foregoing methods, the cancer is an epithelial cancer, e.g., an endometrial cancer, ovarian cancer, cervical cancer, vulvar cancer, uterine cancer, fallopian tube cancer, breast cancer, prostate cancer, lung cancer, pancreatic cancer, urinary cancer, bladder cancer, head and neck cancer, oral cancer or liver cancer.

[0033] In certain embodiments of any of the foregoing methods, the cancer is a hematologic cancer, e.g., a leukemia, lymphoma, or multiple myeloma, e.g., Chronic lymphocytic leukemia (CLL), Acute myeloid leukemia (AML), Chronic myelogenous leukemia (CML), Non-Hodgkin lymphoma (NHL), Burkitt lymphoma, Chronic myeloid monocytic leukemia (CMML), Eosinphilia, Essential thrombocytosis, Hairy cell leukemia, and NK cell lymphoma.

[0034] In certain embodiments of any of the foregoing methods, the method further comprises administering an IDO antagonist, or an immune checkpoint antagonist, e.g., a PD-1 antagonist, PD-L1 antagonist, CTLA-4 antagonist, adenosine A2A receptor antagonist, B7-H3 antagonist, B7-H4 antagonist, BTLA antagonist, KIR antagonist, LAG3 antagonist, TIM-3 antagonist, VISTA antagonist or TIGIT antagonist. In certain embodiments of any of the foregoing methods, the subject is a human.

[0035] These and other aspects and features of the invention are described in the following detailed description and claims.

### DESCRIPTION OF THE DRAWINGS

[0036] The invention can be more completely understood with reference to the following drawings.

[0037] FIGS. 1A-C are schematic representations of three antibody sialidase conjugates (ASCs). The first type of ASC, referred to as “Raptor,” includes an antibody (with two heavy chains and two light chains) with a sialidase fused at the C-terminus of each heavy chain of the antibody (FIG. 1A). The second type of ASC, referred to as “Janus,” contains one antibody arm (with one heavy chain and one light chain), and one sialidase-Fc fusion with a sialidase fused at the N-terminus of the Fc. Each Fc domain polypeptide in the Janus ASC may contain either the “knob” (T366Y) or “hole” (Y407T) mutation for heterodimerization (residue numbers according to EU numbering, Kabat, E. A., et al. (1991) supra) (FIG. 1B). The third type of ASC, referred to as “Lobster,” contains two Fc domain polypeptides each with a sialidase fused at the N-terminus of the Fc and a scFv fused at the C-terminus of the Fc (FIG. 1C).

[0038] FIG. 2 depicts an SDS-PAGE gel showing recombinant human Neu1, Neu2, Neu3, and Salmonella typhimurium (St-sialidase) under non-reducing and reducing conditions. Monomer and dimer species are indicated.

[0039] FIG. 3 is a bar graph showing the enzymatic activity of recombinant human Neu1, Neu2, and Neu3.

[0040] FIG. 4 is a line graph showing enzymatic activity as a function of substrate concentration for recombinant human Neu2 and Neu3 at the indicated pH.

[0041] FIG. 5 depicts the degree of sialic acid removal from three human cell lines by neuraminidase constructs of the current invention. Specifically, Raji Burkitt lymphoma cells, Ramos lymphoma cells and SKOV-3 ovarian cells were treated for 16 hours using either a mutant neuraminidase lacking enzymatic activity (LOF), neuraminidase construct #1or untreated cells (No Tx). Cells were then stained with PNA, a lectin that binds to terminal galactose residues. An increase in PNA staining is indicative of the removal of terminal sialic acids by the neuraminidase and exposure of the underlying galactose.

[0042] FIGS. 6A and 6B depicts the degree of sialic acid removal from the CD19 positive Raji cells (FIG. 6A) and CD3 positive CAR-T cells (FIG. 6B) following 16 hours cotreatment with neuraminidase construct #1. Specifically, both target and effector cell were analyzed for PNA staining following 16 hours with either a mutant neuraminidase lacking enzymatic activity (LOF), neuraminidase construct #1 or untreated cells (No Tx).

[0043] FIGS. 7A and 7B depict the degree of sialic acid removal from the CD19 positive Ramos cells (FIG. 7A) and CD3 positive CAR-T cells (FIG. 7B) following 16 hours cotreatment with neuraminidase construct #1. Specifically, both target and effector cells were analyzed for PNA staining following 16 hours with either a mutant neuraminidase lacking enzymatic activity (LOF), neuraminidase construct #1 or untreated cells (No Tx).

[0044] FIGS. 8A, B and C depict the analysis of secreted cytokines from the 16 hour time point. Specifically, following incubation of the CAR-T cells, Raji target cells and neuraminidase construct #1 for 16 hours, cells were removed, and conditioned media analyzed for IFN-gamma (FIG. 8A), IL-2 (FIG. 8B) and TNF-alpha (FIG. 8C) by flow multiplex (LegendPlex). In each panel, the No Tx, LOF and neuraminidase construct #1 (respectively) analysis in quadruplicate assays at the indicated E:T ratio is shown.

[0045] FIG. 9 depicts the analysis of Siglec7 and Siglec9 expression on CAR-T cells as compared to peripheral blood mononuclear cells (PBMCs) as a positive control. Specifically, CAR-T cells prepared from two independent donors or PBMCs from a healthy donor were stained for Siglec9 expression (left panels) or for Siglec7 expression (right panels) and compared to isotype staining.

### DETAILED DESCRIPTION

[0046] The present invention provides methods and compositions for treating cancer in a subject. The invention is based, in part, upon the discovery that an anti-cancer treatment using an immune cell, e.g., a T-cell, e.g., a CAR T-cell, can be enhanced when the activity of a sialidase is introduced into, up regulated, or otherwise increased in the immune cell. Additionally, an anti-cancer treatment using an immune cell, e.g., a T-cell, e.g., a CAR T-cell, can be enhanced when the immune cell is administered in combination with a sialidase, or is pretreated with a sialidase before administration to a subject. It is contemplated that the sialidase removes sialic acid and/or sialic acid containing molecules from the surface of cancer cells, immune cells, and/or other molecules in the tumor microenvironment, thereby reducing immune inhibition mediated by the sialic acid and/or sialic acid containing molecules.

[0047] Accordingly, in one aspect, the invention provides an isolated immune cell modified to have increased sialidase activity relative to a similar or identical cell that has not been modified. In certain embodiments, the immune cell comprises an exogenous nucleotide sequence encoding a sialidase. In another aspect, the invention provides a pharmaceutical composition comprising an isolated immune cell, e.g., a T-cell, modified to have up regulated or increased functional activity associated with or modulated by a sialidase. In another aspect, the invention provides a pharmaceutical composition comprising an isolated immune cell, e.g., a T-cell, and a sialidase. In another aspect, the invention provides a pharmaceutical composition comprising an isolated immune cell, e.g., a T-cell, that has been pretreated with a sialidase. In another aspect, the invention provides a method of treating cancer in a subject in need thereof, the method comprising administering to the subject an isolated immune cell, e.g., a T-cell, modified to have sialidase activity or modified to have up regulated or increased functional activity associated with or modulated by a sialidase. In another aspect, the invention provides a method of treating cancer in a subject in need thereof, the method comprising administering to the subject an isolated immune cell, e.g., a T-cell, and a sialidase. In another aspect, the invention provides a method of treating cancer in a subject in need thereof, the method comprising administering to the subject an isolated immune cell, e.g., a T-cell, pretreated with a sialidase.

[0048] Various features and aspects of the invention are discussed in more detail below.

### I. Immune Cells

[0049] Among other things, the invention provides methods and compositions comprising an isolated immune cell useful in the treatment of cancer where the immune cell can be (i) used as is in combination with a sialidase or (ii) engineered to have sialidase activity or up regulated or otherwise increased sialidase activity relative to a similar or identical cell that has not been modified. Immune cells include, e.g., lymphocytes, such as B-cells and T-cells, natural killer cells, myeloid cells, such as monocytes, macrophages, eosinophils, mast cells, basophils, and granulocytes.

[0050] In certain embodiments, the immune cell is a T-cell, which can be, for example, a cultured T-cell, e.g., a primary T-cell, or a T-cell from a cultured T-cell line, e.g., Jurkat, SupTi, etc., or a T-cell obtained from a mammal, for example, from a subject to be treated. If obtained from a mammal, the T-cell can be obtained from numerous sources, including but not limited to blood, bone marrow, lymph node, the thymus, or other tissues or fluids. T-cells can also be enriched or purified. The T-cell can be any type of T-cell and can be of any developmental stage, including but not limited to, CD4+/CD8+ double positive T-cells, CD4+ helper T-cells, e.g., Th1 and Th2 cells, CD4+ T-cells, CD8+ T-cells (e.g., cytotoxic T-cells), tumor infiltrating lymphocytes (TILs), memory T-cells (e.g., central memory T-cells and effector memory T-cells), naive T-cells, and the like. The cells (e.g., the T-cells) can include autologous cells derived from a subject to be treated, or alternatively allogenic cells derived from a donor.

[0051] In certain embodiments, the T-cell binds an antigen, e.g., a cancer antigen, through a T-cell receptor. The T-cell receptor may be an endogenous or a recombinant T-cell receptor. T-cell receptors comprise two chains referred to as the α- and β-chains, that combine on the surface of a T-cell to form a heterodimeric receptor that can recognize MHC-restricted antigens. Each of α- and β-chain comprises two regions, a constant region and a variable region. Each variable region of the α- and β-chains defines three loops, referred to as complementary determining regions (CDRs) known as CDR₁, CDR₂, and CDR₃ that confer the T-cell receptor with antigen binding activity and binding specificity.

[0052] In certain embodiments, the immune cell, e.g., T-cell or NK-cell, binds to an antigen, e.g., a cancer antigen, through a chimeric antigen receptor (CAR), i.e., the T-cell or NK-cell comprises an exogenous nucleotide sequence encoding a CAR. As used herein, the terms “chimeric antigen receptor,” or “CAR,” refer to any artificial receptor including an antigen-specific binding moiety and one or more signaling chains derived from an immune receptor. CARs can comprise a single chain fragment variable (scFv) of an antibody specific for an antigen coupled via hinge and transmembrane regions to cytoplasmic domains of T-cell signaling molecules (e.g. a T-cell costimulatory domain (e.g., from CD28, CD137, OX40, ICOS, or CD27) in tandem with a T-cell triggering domain (e.g. from CD3ζ)) and/or to cytoplasmic domains of NK-cell signaling molecules (e.g. DNAX-activation protein 12 (DAP12)). A T-cell expressing a chimeric antigen receptor is referred to as a CAR T-cell and an NK-cell expressing a chimeric antigen receptor is referred to as a CAR NK-cell.

[0053] Exemplary CAR T-cells include CD19 targeted CTL019 cells (see, Grupp et al. (2015) BLOOD 126:4983), 19-28z cells (see, Park et al. (2015) J. CLIN. ONCOL. 33(15S):7010), and KTE-C19 cells (see, Locke et al. (2015) BLOOD 126:3991). Exemplary mesothelin targeted CAR T-cells are described in International (PCT) Publication Nos. WO2013142034, WO2015188141, and WO2017040945. Additional exemplary CAR T-cells are described in U.S. Pat. Nos. 8,399,645, 8,906,682, 7,446,190, 9,181,527, 9,272,002, and 9,266,960, U.S. Patent Publication Nos. US20160362472, US20160200824, and US20160311917 and International (PCT) Publication No. WO2015120180. Engineered immune cells containing a T-cell receptor knockout and a chimeric antigen receptor that binds CD123 are described in International (PCT) Publication No. WO2016120220.

[0054] In certain embodiments, a CAR binds a cancer antigen selected from mesothelin, prostate specific membrane antigen (PSMA), prostate stem cell antigen (PCSA), carbonic anhydrase IX (CAIX), carcinoembryonic antigen (CEA), CD5, CD7, CD10, CD19, CD20, CD22, CD30, CD33, CD34, CD38, CD41, CD44, CD47, CD49f, CD56, CD74, CD123, CD133, CD138, epithelial glycoprotein2 (EGP 2), epithelial glycoprotein-40 (EGP-40), epithelial cell adhesion molecule (EpCAM), folate-binding protein (FBP), fetal acetylcholine receptor (AChR), folate receptor-α and β (FRa and β), Ganglioside G2 (GD2), Ganglioside G3 (GD3), an Epidermal Growth Factor Receptor (EGFR), Epidermal Growth Factor Receptor 2 (HER-2/ERB2), Epidermal Growth Factor Receptor vIII (EGFRvIII), ERB3, ERB4, human telomerase reverse transcriptase (hTERT), Interleukin-13 receptor subunit alpha-2 (IL-13Ra2), K-light chain, kinase insert domain receptor (KDR), Lewis A (CA19.9), Lewis Y (LeY), LI cell adhesion molecule (LICAM), melanoma-associated antigen 1 (melanoma antigen family A1, MAGE-A1), Mucin 16 (MUC-16), Mucin 1 (MUC-1), KG2D ligands, cancer-testis antigen NY-ESO-1, oncofetal antigen (h5T4), tumor-associated glycoprotein 72 (TAG-72), vascular endothelial growth factor R2 (VEGF-R2), Wilms tumor protein (WT-1), type 1 tyrosine-protein kinase transmembrane receptor (ROR1), B7-H3 (CD276), B7-H6 (Nkp30), Chondroitin sulfate proteoglycan-4 (CSPG4), DNAX Accessory Molecule (DNAM-1), Ephrin type A Receptor 2 (EpHA2), Fibroblast Associated Protein (FAP), Gp100/HLA-A2, Glypican 3 (GPC3), HA-IH, HERK-V, IL-1 IRa, Latent Membrane Protein 1 (LMP1), Neural cell-adhesion molecule (N-CAM/CD56), programmed cell death receptor ligand 1 (PD-L1), B Cell Maturation Antigen (BCMA), and Trail Receptor (TRAIL R). In certain embodiments, a CAR binds a cancer antigen selected from mesothelin, HER-2/ERB2, EGFR, CD20, PD-L1, CEA, EpCAM, GPC3, BCMA, CD47, CD38 and MUC-1.

### II. Sialidases

[0055] In certain embodiments, an immune cell, e.g., a T-cell, is modified to express a sialidase, or is administered in combination with a sialidase.

[0056] As used herein, the term “sialidase” refers to any enzyme, or a functional fragment thereof, that cleaves a terminal sialic acid residue from a substrate, for example, a glycoprotein or a glycolipid. As used herein, a “functional fragment” of a sialidase refers to fragment of a full-length sialidase that retains, for example, at least 10%, at least 20%, at least 30%, at least 40%, at least 50%, at least 60%, at least 70%, at least 80%, at least 90%, or 100% of the enzymatic activity of the corresponding full-length sialidase. Sialidase enzymatic activity may be assayed by any method known in the art, including, for example, by measuring the release of sialic acid from the fluorogenic substrate 4-methylumbelliferyl-N-acetylneuraminic acid (4MU-NeuAc). In certain embodiments, the functional fragment comprises at least 100, 150, 200, 250, 300, 310, 320, 330, 340, 350, 360, or 370 consecutive amino acids present in a full-length sialidase. The term sialidase includes variants having one or more amino acid substitutions, deletions, or insertions relative to a wild-type sialidase sequence, and/or fusion proteins or conjugates including a sialidase. Sialidases are also called neuraminidases, and, unless indicated otherwise, the two terms are used interchangeably herein.

[0057] In certain embodiments, the sialidase is a eukaryotic sialidase, e.g., a mammalian sialidase, e.g., a human sialidase. Four sialidases have been found in the human genome and are referred to as Neu1, Neu2, Neu3 and Neu4.

[0058] Neu1 is a lysosomal neuraminidase enzyme which functions in a complex with beta-galactosidase and cathepsin A. The amino acid sequence of human Neu1 is depicted in SEQ ID NO: 1, and a nucleotide sequence encoding human Neu1 is depicted in SEQ ID NO: 9.

[0059] Neu2 is a cytosolic sialidase enzyme. The amino acid sequence of human Neu2 is depicted in SEQ ID NO: 2, and a nucleotide sequence encoding human Neu2 is depicted in SEQ ID NO: 10.

[0060] Neu3 is a plasma membrane sialidase with an activity specific for gangliosides. Neu3 has two isoforms: isoform 1 and isoform 2. The amino acid sequence of human Neu3, isoform 1 is depicted in SEQ ID NO: 3, and a nucleotide sequence encoding human Neu3, isoform 1 is depicted in SEQ ID NO: 11. The amino acid sequence of human Neu3, isoform 4 is depicted in SEQ ID NO: 4, and a nucleotide sequence encoding human Neu3, isoform 2 is depicted in SEQ ID NO: 12.

[0061] Neu4 has two isoforms: isoform 1 is a peripheral membrane protein and isoform 2 localizes to the lysosome lumen. The amino acid sequence of human Neu4, isoform 1 is depicted in SEQ ID NO: 5, and a nucleotide sequence encoding human Neu4, isoform 1 is depicted in SEQ ID NO: 13. The amino acid sequence of human Neu4, isoform 2 is depicted in SEQ ID NO: 6, and a nucleotide sequence encoding human Neu4, isoform 2 is depicted in SEQ ID NO: 14.

[0062] Four sialidases have also been found in the mouse genome and are referred to as Neu1, Neu2, Neu3 and Neu4. The amino acid sequence of mouse Neu1 is depicted in SEQ ID NO: 34, and a nucleotide sequence encoding mouse Neu1 is depicted in SEQ ID NO: 58. The amino acid sequence of mouse Neu2 is depicted in SEQ ID NO: 35 and a nucleotide sequence encoding mouse Neu2 is depicted in SEQ ID NO: 59. The amino acid sequence of mouse Neu3 is depicted in SEQ ID NO: 56, and a nucleotide sequence encoding mouse Neu3 is depicted in SEQ ID NO: 60. The amino acid sequence of mouse Neu4 is depicted in SEQ ID NO: 57, and a nucleotide sequence encoding mouse Neu4 is depicted in SEQ ID NO: 61.

[0063] In certain embodiments, the sialidase is a prokaryotic sialidase. Exemplary prokaryotic sialidases include sialidases from Salmonella typhimurium and Vibrio cholera. The amino acid sequence of Salmonella typhimurium sialidase (St-sialidase) is depicted in SEQ ID NO: 7, and a nucleotide sequence encoding Salmonella typhimurium sialidase is depicted in SEQ ID NO: 15. The amino acid sequence of Vibrio cholera sialidase is depicted in SEQ ID NO: 8, and a nucleotide sequence encoding Vibrio cholera sialidase is depicted in SEQ ID NO: 16.

[0064] In certain embodiments the sialidase can cleave α2,3, α2,6, and/or α2,8 linkages. In certain embodiments the sialidase can cleave α2,3 and α2,8 linkages.

[0065] In certain embodiments, the sialidase comprises the amino acid sequence of SEQ ID NO: 1, SEQ ID NO: 2, SEQ ID NO: 3, SEQ ID NO: 4, SEQ ID NO: 5, SEQ ID NO: 6, SEQ ID NO: 7, or SEQ ID NO: 8, or an amino acid sequence that has at least 90%, 95%, 96%, 97%, 98%, or 99% sequence identity to SEQ ID NO: 1, SEQ ID NO: 2, SEQ ID NO: 3, SEQ ID NO: 4, SEQ ID NO: 5, SEQ ID NO: 6, SEQ ID NO: 7, or SEQ ID NO: 8. Sequence identity may be determined in various ways that are within the skill of a person skilled in the art, e.g., using publicly available computer software such as BLAST, BLAST-2, ALIGN or Megalign (DNASTAR) software. BLAST (Basic Local Alignment Search Tool) analysis using the algorithm employed by the programs blastp, blastn, blastx, tblastn and tblastx (Karlin et al., (1990) PROC. NATL. ACAD. SCI. USA 87:2264-2268; Altschul, (1993) J. MOL. EVOL. 36:290-300; Altschul et al., (1997) NUCLEIC ACIDS RES. 25:3389-3402, incorporated by reference herein) are tailored for sequence similarity searching. For a discussion of basic issues in searching sequence databases see Altschul et al., (1994) NATURE GENETICS 6:119-129, which is fully incorporated by reference herein. Those skilled in the art can determine appropriate parameters for measuring alignment, including any algorithms needed to achieve maximal alignment over the full length of the sequences being compared. The search parameters for histogram, descriptions, alignments, expect (i.e., the statistical significance threshold for reporting matches against database sequences), cutoff, matrix and filter are at the default settings. The default scoring matrix used by blastp, blastx, tblastn, and tblastx is the BLOSUM62 matrix (Henikoff et al., (1992) PROC. NATL. ACAD. Sci. USA 89:10915-10919, fully incorporated by reference herein). Four blastn parameters may be adjusted as follows: Q=10 (gap creation penalty); R=10 (gap extension penalty); wink=1 (generates word hits at every wink.sup.th position along the query); and gapw=16 (sets the window width within which gapped alignments are generated). The equivalent blastp parameter settings may be Q=9; R=2; wink=1; and gapw=32. Searches may also be conducted using the NCBI (National Center for Biotechnology Information) BLAST Advanced Option parameter (e.g.: -G, Cost to open gap [Integer]: default=5 for nucleotides/11 for proteins; −E, Cost to extend gap [Integer]: default=2 for nucleotides/1 for proteins; −q, Penalty for nucleotide mismatch [Integer]: default=−3; −r, reward for nucleotide match [Integer]: default=1; −e, expect value [Real]: default=10; −W, wordsize [Integer]: default=11 for nucleotides/28 for megablast/3 for proteins; −y, Dropoff (X) for blast extensions in bits: default=20 for blastn/7 for others; —X, X dropoff value for gapped alignment (in bits): default=15 for all programs, not applicable to blastn; and —Z, final X dropoff value for gapped alignment (in bits): 50 for blastn, 25 for others). ClustalW for pairwise protein alignments may also be used (default parameters may include, e.g., Blosum62 matrix and Gap Opening Penalty=10 and Gap Extension Penalty=0.1). A Bestfit comparison between sequences, available in the GCG package version 10.0, uses DNA parameters GAP=50 (gap creation penalty) and LEN=3 (gap extension penalty). The equivalent settings in Bestfit protein comparisons are GAP=8 and LEN=2.

### Mutant Sialidases

[0066] In certain embodiments, the sialidase is a mutant sialidase. In certain embodiments, the mutant sialidase comprises a substitution of at least one wild-type amino acid residue, wherein the substitution increases at least one of the (a) expression, (b) stability and (c) activity of the sialidase, or a combination of (a) and (b), combination of (a) and (c), a combination of (b) and (c), or a combination of (a), (b) and (c). In certain embodiments, a mutant sialidase has about 5%, about 10%, about 15%, about 20%, about 25%, about 30%, about 35%, about 40%, about 45%, about 50%, about 60%, about 65%, about 70%, about 75%, about 80%, about 85%, about 90%, about 95%, about 100%, or more than 100% of the enzymatic activity of a corresponding (or template) wild-type sialidase. In certain embodiments, a mutant sialidase has a different substrate specificity than the corresponding wild-type sialidase. In certain embodiments, the expression yield of the mutant sialidase in mammalian cells, e.g., HEK293 cells, CHO cells, murine myeloma cells (NS0, Sp2/0), or human fibrosarcoma cells (HT-1080), e.g., HEK293 cells, is greater than about 10%, about 20%, about 50%, about 75%, about 100%, about 150%, about 200%, about 250%, about 300%, about 400%, about 500%, about 600%, about 700%, about 800%, about 900%, or about 1,000% of the expression yield of the corresponding wild-type sialidase. In certain embodiments, a mutant sialidase has at least 50%, 55%, 60%, 65%, 70%, 75%, 80%, 85%, 90%, 95%, 96%, 97%, 98%, or 99% sequence identity to the amino acid sequence of a corresponding wild-type sialidase.

[0067] In certain embodiments, the mutant sialidase comprises a substitution of at least one cysteine (cys, C) residue. In certain embodiments, the mutant sialidase contains at least one mutation of a free cysteine (e.g., for human Neu1 (SEQ ID NO: 1), C111, C117, C171, C183, C218, C240, C242, and C252; for human Neu2 (SEQ ID NO: 2), C125, C196, C219, C272, C332, and C352; for Neu3 (SEQ ID NO: 3), C7, C90, C99, C106, C127, C136, C189, C194, C226, C242, C250, C273, C279, C295, C356, C365, C368, C384, C383, C394, and C415; and for Neu4 (SEQ ID NO: 5), C88, C125, C126, C186, C191, C211, C223, C239, C276, C437, C453, C480, and C481). Free cysteines can be substituted with any amino acid. In certain embodiments, the free cysteine is substituted with serine (ser, S), isoleucine (iso, I), valine (val, V), phenylalanine (phe, F), leucine (leu, L), or alanine (ala, A). Exemplary cysteine substitutions in human Neu2 include C125A, C125I, C125S, C125V, C196A, C196L, C196V, C272S, C272V, C332A, C332S, C332V, C352L, and C352V. In certain embodiments, the mutant sialidase comprises two or more cysteine substitutions. Exemplary double or triple substitutions in human Neu2 include: C125S and C332S; C272V and C332A; C272V and C332S; C332A and C352L; C125S and C196L; C196L and C352L; C196L and C332A; C332A and C352L; and C196L, C332A and C352L. In certain embodiments, the mutant sialidase is a human Neu2 sialidase and comprises the substitutions C322A and C352L. In certain embodiments, the mutant sialidase contains an amino acid substitution at 2, 3, 4, 5, or 6 cysteines typically present in a human sialidase, e.g., Neu2 or Neu3.

[0068] In certain embodiments, the mutant sialidase comprises at least one amino acid substitution, wherein the substitution increases the isoelectric point (pI) of the sialidase and/or decreases the hydrophobicity of the sialidase relative to a sialidase without the substitution. This may be achieved by introducing one or more charged amino acids, for example, positively or negatively charged amino acids, into the sialidase. In certain embodiments, the amino acid substitution is to a charged amino acid, for example, a positively charged amino acid such as lysine (lys, K), histidine (his, H), or arginine (arg, R), or a negatively charged amino acid such as aspartic acid (asp, D) or glutamic acid (glu, E). In certain embodiments, the amino acid substitution is to a lysine residue. In certain embodiments, the substitution increases the pI of the sialidase to about 7.75, about 8, about 8.25, about 8.5, about 8.75, about 9, about 9.25, about 9.5, or about 9.75. In certain embodiments, the amino acid substitution occurs at a surface exposed D or E amino acid, in a helix or loop, or in a position that has a K or R in the corresponding position of St-sialidase. In certain embodiments, the amino acid substitution occurs at an amino acid that is remote from the catalytic site or otherwise not involved in catalysis, an amino acid that is not conserved with the other human Neu proteins or with an St-Sialidase or Clostridium NanH, or an amino acid that is not located in a domain important for function (e.g., an Asp-box or beta strand). Exemplary amino acid substitutions in human Neu2 that increase the isoelectric point (pI) of the sialidase and/or decrease the hydrophobicity of the sialidase relative to a sialidase without the substitution include A2E, A2K, D215K, V325E, V325K, E257K, and E319K. In certain embodiments, the mutant sialidase comprises two or more amino acid substitutions, including, for example, A2K and V325E, A2K and V325K, E257K and V325K, A2K and E257K, and E257K and A2K and V325K.

[0069] In certain embodiments, the N-terminal six amino acids of the mouse thymus Neu2 isoform, MEDLRP (SEQ ID NO: 17), or variations thereof, can be added onto a human Neu, e.g., human Neu2. In certain embodiments, the mutant sialidase comprises a peptide at least two amino acid residues in length covalently associated with an N-terminal amino acid of the sialidase. In certain embodiments the mutant sialidase comprises the peptide MEDLRP (SEQ ID NO: 17) or EDLRP (SEQ ID NO: 18) covalently associated with an N-terminal amino acid of the sialidase. In certain embodiments, the sialidase may further comprise a cleavage site, e.g., a proteolytic cleavage site, located between the peptide, e.g., MEDLRP (SEQ ID NO: 17) or EDLRP (SEQ ID NO: 18), and the remainder of the sialidase. In certain embodiments, the peptide, e.g., MEDLRP (SEQ ID NO: 17) or EDLRP (SEQ ID NO: 18), may be postranslationally cleaved from the remainder of the sialidase.

[0070] Alternatively to, or in combination with, the N-terminal addition, 1-5 amino acids of the 12 amino acid N-terminal region of the mutant sialidase may be removed, e.g., the N-terminal methionine can be removed. In certain embodiments, if the sialidase is human Neu2, the N-terminal methionine can be removed, the first five amino acids (MASLP; SEQ ID NO: 19) can be removed, or the second through fourth amino acids (ASLP; SEQ ID NO: 20) can be removed. In certain embodiments, 1-5 amino acids of the 12 amino acid N-terminal region of the mutant sialidase are substituted with MEDLRP (SEQ ID NO: 17), EDLRP (SEQ ID NO: 18), or TVEKSVVF (SEQ ID NO: 21). For example, in certain embodiments, if the sialidase is human Neu2, the amino acids MASLP (SEQ ID NO: 19), ASLP (SEQ ID NO: 20) or M are substituted with MEDLRP (SEQ ID NO: 17), EDLRP (SEQ ID NO: 18) or TVEKSVVF (SEQ ID NO: 21). In certain embodiments, the sialidase comprises a LSHSLST (SEQ ID NO: 79) peptide on the N-terminus.

[0071] In certain embodiments, the mutant sialidase comprises a substitution of at least one wild-type amino acid residue, wherein the substitution increases hydrophobic interactions and/or hydrogen bonding between the N- and C-termini of the sialidase relative to a sialidase without the substitution. In certain embodiments, the wild-type amino acid is substituted with asparagine (asn, N), lysine (lys, K), tyrosine (tyr, Y), phenylalanine (phe, F), or tryptophan (trp, W). Exemplary substitutions in human Neu2 that increase hydrophobic interactions and/or hydrogen bonding between the N- and C-termini include L4N, L4K, V6Y, L7N, L4N and L7N, L4N and V6Y and L7N, V12N, V12Y, V12L, V6Y, V6F, or V6W. In certain embodiments, the sialidase comprises the V6Y substitution.

[0072] In certain embodiments, the mutant sialidase comprises a combination of the above substitutions. For example, a mutant human Neu2 sialidase can comprise the additional amino acids MEDLRP (SEQ ID NO: 17), EDLRP (SEQ ID NO: 18), or TVEKSVVF (SEQ ID NO: 21) at the N-terminus and, in combination, can comprise at least one L4N, L4K, V6Y, L7N, L4N and L7N, L4N and V6Y and L7N, V12N, V12Y, V12L, V6Y, V6F, or V6W substitution. In certain embodiments, the amino acids MASLP (SEQ ID NO: 19), ASLP (SEQ ID NO: 20) or M of a mutant human Neu2 sialidase are replaced with MEDLRP (SEQ ID NO: 17), EDLRP (SEQ ID NO: 18) or TVEKSVVF (SEQ ID NO: 21) and the mutant human Neu2 sialidase also comprises at least one L4N, L4K, V6Y, L7N, L4N and L7N, L4N and V6Y and L7N, V12N, V12Y, V12L, V6Y, V6F, or V6W substitution.

[0073] Additionally, in certain embodiments, the sialidase comprises a substitution or deletion of an N-terminal methionine at the N-terminus of the sialidase. For example, in certain embodiments, the sialidase comprises a substitution of a methionine residue at a position corresponding to position 1 of wild-type human Neu2 (SEQ ID NO: 2), e.g., the methionine at a position corresponding to position 1 of wild-type human Neu2 is substituted by alanine (M1A) or aspartic acid (M1D). In other embodiments, the sialidase comprises a deletion of a methionine residue at a position corresponding to position 1 (ΔM1) of wild-type human Neu2 (SEQ ID NO: 2).

[0074] In certain embodiments, a mutant human Neu2 sialidase comprises at least one of the following substitutions: I187K, A328E, K370N, or H210N. In certain embodiments, a mutant human Neu2 sialidase comprises the substitution of the amino acids GDYDAPTHQVQW (SEQ ID NO: 22) with the amino acids SMDQGSTW (SEQ ID NO: 23) or STDGGKTW (SEQ ID NO: 24). In certain embodiments, a mutant human Neu2 sialidase comprises the substitution of the amino acids PRPPAPEA (SEQ ID NO: 25) with the amino acids QTPLEAAC (SEQ ID NO: 26). In certain embodiments, a mutant human Neu2 sialidase comprises the substitution of the amino acids NPRPPAPEA (SEQ ID NO: 27) with the amino acids SQNDGES (SEQ ID NO: 28). In certain embodiments, a mutant human Neu2 sialidase comprises at least one substitution at a position corresponding to V212, A213, Q214, D215, T216, L217, E218, C219, Q220, V221, A222, E223, V224, E225, or T225.

[0075] In certain embodiments, a mutant sialidase comprises: (a) a substitution of a proline residue at a position corresponding to position 5 of wild-type human Neu2 (P5); (b) a substitution of a lysine residue at a position corresponding to position 9 of wild-type human Neu2 (K9); (c) a substitution of a lysine residue at a position corresponding to position 44 of wild-type human Neu2 (K44); (d) a substitution of a lysine residue at a position corresponding to position 45 of wild-type human Neu2 (K45); (e) a substitution of a leucine residue at a position corresponding to position 54 of wild-type human Neu2 (L54); (f) a substitution of a proline residue at a position corresponding to position 62 of wild-type human Neu2 (P62); (g) a substitution of a glutamine residue at a position corresponding to position 69 of wild-type human Neu2 (Q69); (h) a substitution of an arginine residue at a position corresponding to position 78 of wild-type human Neu2 (R78); (i) a substitution of an alanine residue at a position corresponding to position 93 of wild-type human Neu2 (A93); (j) a substitution of a glycine residue at a position corresponding to position 107 of wild-type human Neu2 (G107); (k) a substitution of a glutamine residue at a position corresponding to position 108 of wild-type human Neu2 (Q108); (l) a substitution of a glutamine residue at a position corresponding to position 112 of wild-type human Neu2 (Q112); (m) a substitution of a cysteine residue at a position corresponding to position 125 of wild-type human Neu2 (C125); (n) a substitution of a glutamine residue at a position corresponding to position 126 of wild-type human Neu2 (Q126); (o) a substitution of an alanine residue at a position corresponding to position 150 of wild-type human Neu2 (A150); (p) a substitution of a cysteine residue at a position corresponding to position 164 of wild-type human Neu2 (C164); (q) a substitution of an alanine residue at a position corresponding to position 171 of wild-type human Neu2 (A171); (r) a substitution of a leucine residue at a position corresponding to position 217 of wild-type human Neu2 (L217); (s) a substitution of a threonine residue at a position corresponding to position 249 of wild-type human Neu2 (T249); (t) a substitution of an aspartic acid residue at a position corresponding to position 251 of wild-type human Neu2 (D251); (u) a substitution of a glutamine residue at a position corresponding to position 270 of wild-type human Neu2 (Q270); (v) a substitution of a tryptophan residue at a position corresponding to position 292 of wild-type human Neu2 (W292); (w) a substitution of a serine residue at a position corresponding to position 301 of wild-type human Neu2 (S301); (x) a substitution of a tryptophan residue at a position corresponding to position 302 of wild-type human Neu2 (W302); (y) a substitution of a valine residue at a position corresponding to position 363 of wild-type human Neu2 (V363); or (z) a substitution of a leucine residue at a position corresponding to position 365 of wild-type human Neu2 (L365); or a combination of any of the foregoing substitutions. For example, the sialidase may comprise a substitution of K9, P62, A93, Q270, S301, W302, V363, or L365, or a combination of any of the foregoing substitutions.

[0076] In certain embodiments, in the sialidase: (a) the proline residue at a position corresponding to position 5 of wild-type human Neu2 is substituted by histidine (P5H); (b) the lysine residue at a position corresponding to position 9 of wild-type human Neu2 is substituted by aspartic acid (K9D); (c) the lysine residue at a position corresponding to position 44 of wild-type human Neu2 is substituted by arginine (K44R) or glutamic acid (K44E); (d) the lysine residue at a position corresponding to position 45 of wild-type human Neu2 is substituted by alanine (K45A), arginine (K45R), or glutamic acid (K45E); (e) the leucine residue at a position corresponding to position 54 of wild-type human Neu2 is substituted by methionine (L54M); (f) the proline residue at a position corresponding to position 62 of wild-type human Neu2 is substituted by asparagine (P62N), aspartic acid (P62D), histidine (P62H), glutamic acid (P62E), glycine (P62G), serine (P62S), or threonine (P62T); (g) the glutamine residue at a position corresponding to position 69 of wild-type human Neu2 is substituted by histidine (Q69H); (h) the arginine residue at a position corresponding to position 78 of wild-type human Neu2 is substituted by lysine (R78K); (i) the alanine residue at a position corresponding to position 93 of wild-type human Neu2 is substituted by glutamic acid (A93E) or lysine (A93K); (j) the glycine residue at a position corresponding to position 107 of wild-type human Neu2 is substituted by aspartic acid (G107D); (k) the glutamine residue at a position corresponding to position 108 of wild-type human Neu2 is substituted by histidine (Q108H); (l) the glutamine residue at a position corresponding to position 112 of wild-type human Neu2 is substituted by arginine (Q112R) or lysine (Q112K); (m) the cysteine residue at a position corresponding to position 125 of wild-type human Neu2 is substituted by leucine (C125L); (n) the glutamine residue at a position corresponding to position 126 of wild-type human Neu2 is substituted by leucine (Q126L); (o) the alanine residue at a position corresponding to position 150 of wild-type human Neu2 is substituted by valine (A150V); (p) the cysteine residue at a position corresponding to position 164 of wild-type human Neu2 is substituted by glycine (C164G); (q) the alanine residue at a position corresponding to position 171 of wild-type human Neu2 is substituted by glycine (A171G); (r) the leucine residue at a position corresponding to position 217 of wild-type human Neu2 is substituted by alanine (L217A) or valine (L217V); (s) the threonine residue at a position corresponding to position 249 of wild-type human Neu2 is substituted by alanine (T249A); (t) the aspartic acid residue at a position corresponding to position 251 of wild-type human Neu2 is substituted by glycine (D251G); (u) the glutamine residue at a position corresponding to position 270 of wild-type human Neu2 is substituted by alanine (Q270A), histidine (Q270H), phenylalanine (Q270F) or proline (Q270P); (v) the tryptophan residue at a position corresponding to position 292 of wild-type human Neu2 is substituted by arginine (W292R); (w) the serine residue at a position corresponding to position 301 of wild-type human Neu2 is substituted by arginine (S301R); (x) the tryptophan residue at a position corresponding to position 302 of wild-type human Neu2 is substituted by lysine (W302K); (y) the valine residue at a position corresponding to position 363 of wild-type human Neu2 is substituted by arginine (V363R); or (z) the leucine residue at a position corresponding to position 365 of wild-type human Neu2 is substituted by glutamine (L365Q), histidine (L365H), isoleucine (L365I), lysine (L365K) or serine (L365S), or the sialidase comprises a combination of any of the foregoing substitutions. For example, the sialidase may comprise the K9D, P62G, P62N, P62S, P62T, A93E, Q270A, S301R, W302K, V363R, or L365I substitutions, or a combination of any of the foregoing substitutions.

[0077] In certain embodiments, a mutant sialidase comprises a deletion of a leucine residue at a position corresponding to position 184 of wild-type human Neu2 (ΔL184), a deletion of a histidine residue at a position corresponding to position 185 of wild-type human Neu2 (ΔH185), a deletion of a proline residue at a position corresponding to position 186 of wild-type human Neu2 (ΔP186), a deletion of an isoleucine residue at a position corresponding to position 187 of wild-type human Neu2 (ΔI187), or a deletion of a glutamine residue at a position corresponding to position 184 of wild-type human Neu2 (ΔQ188), or a combination of any of the foregoing deletions.

[0078] In certain embodiments, a mutant sialidase comprises an insertion between a threonine residue at a position corresponding to position 216 of wild-type human Neu2 and a leucine residue at a position corresponding to position 217 of wild-type human Neu2, for example, an insertion of an amino acid selected from S, T, Y, L, F, A, P, V, I, N, D, and H.

[0079] Additional exemplary sialidase mutations, and combinations of sialidase mutations, are described in International (PCT) Patent Application No. PCT/US2019/012207, filed Jan. 3, 2019, including in the Detailed Description in the section entitled “I. Recombinant Human Sialidases,” and in the Examples in Examples 1, 2, 3, 4, 5, and 6. Additional exemplary sialidase mutations, and combinations of sialidase mutations, are described in U.S. Provisional Patent Application No. 62/870,403, filed Jul. 3, 2019, including in the Detailed Description in the section entitled “I. Recombinant Human Sialidases,” and in the Examples in Examples 2, 3, 4, and 8.

[0080] In certain embodiments, a mutant sialidase comprises a combination of any of the mutations contemplated herein. For example, the mutant sialidase enzyme may comprise a combination of 2, 3, 4, 5, 6, 7, 8, 9, 10, or more of the mutations contemplated herein. For example, the mutant sialidase may comprise a M1 deletion (ΔM1), M1A substitution, M1D substitution, V6Y substitution, K9D substitution, P62G substitution, P62N substitution, P62S substitution, P62T substitution, A93E substitution, I187K substitution, Q270A substitution, S301R substitution, W302K substitution, C332A substitution, V363R substitution, L365I substitution, or a combination of any of the foregoing. For example, the mutant sialidase enzyme may comprise a M1 deletion (ΔM1), M1A substitution, M1D substitution, V6Y substitution, I187K substitution, C332A substitution, or a combination of any of the foregoing. For example, the mutant sialidase enzyme may comprise a combination of mutations selected from: M1A and V6Y; M1A and I187K; M1A and C332A; M1D and V6Y; M1D and I187K; M1D and C332A; ΔM1 and V6Y; ΔM1 and I187K; ΔM1 and C332A; V6Y and I187K; V6Y and C332A; I187K and C332A; M1A, V6Y, and I187K; M1A, V6Y, and C332A; M1A, I187K, and C332A; M1D, V6Y, and I187K; M1D, V6Y, and C332A; M1D, I187K, and C332A; ΔM1, V6Y, and I187K; ΔM1, V6Y, and C332A; ΔM1, I187K, and C332A; V6Y, I187K, and C332A; M1A, V6Y, I187K, and C332A; M1D, V6Y, I187K, and C332A; and ΔM1, V6Y, I187K, and C332A. In certain embodiments, the mutant sialidase comprises: (a) the M1D, V6Y, P62G, A93E, I187K, and C332A substitutions; (b) the M1D, V6Y, K9D, A93E, I187K, C332A, V363R, and L365I substitutions; (c) the M1D, V6Y, P62N, I187K, and C332A substitutions; (d) the M1D, V6Y, I187K, Q270A, S301R, W302K, and C332A substitutions; (e) the M1D, V6Y, P62S, I187K, Q270A, S301R, W302K, and C332A substitutions; (f) the M1D, V6Y, P62T, I187K, Q270A, S301R, W302K, and C332A substitutions; or (g) the M1D, V6Y, P62N, I187K, Q270A, S301R, W302K, and C332A substitutions.

[0081] In certain embodiments, the sialidase comprises the amino acid sequence of SEQ ID NO: 36, SEQ ID NO: 37, SEQ ID NO: 38, SEQ ID NO: 39, SEQ ID NO: 63, SEQ ID NO: 64, SEQ ID NO: 65, SEQ ID NO: 66, SEQ ID NO: 83, SEQ ID NO: 84, SEQ ID NO: 85, SEQ ID NO: 86, SEQ ID NO: 87, SEQ ID NO: 88, or SEQ ID NO: 89, or an amino acid sequence that has at least 85%, 90%, 95%, 96%, 97%, 98%, or 99% sequence identity to SEQ ID NO: 36, SEQ ID NO: 37, SEQ ID NO: 38, SEQ ID NO: 39, SEQ ID NO: 63, SEQ ID NO: 64, SEQ ID NO: 65, SEQ ID NO: 66, SEQ ID NO: 83, SEQ ID NO: 84, SEQ ID NO: 85, SEQ ID NO: 86, SEQ ID NO: 87, SEQ ID NO: 88, or SEQ ID NO: 89.

[0082] In certain embodiments, the sialidase comprises the amino acid sequence of

X₁X₂SX₃PX₄LQKESVFQSGAHAYRIPALLYLPGQQSLLAFAEQRASKKDE
HAELIVLRRGDYDAPTHQVQWQAQEVVAQARLDGHRSMNPCPLYDAQTGT
LFLFFIAIPGQVTEQQQLQTRANVTRLX₅QVTSTDHGRTWSSPRDLTDAA
IGPAYREWSTFAVGPGHCLQLHDRARSLVVPAYAYRKLHPX₆QRPIPSAF
X₇FLSHDHGRTWARGHFVAQDTLECQVAEVETGEQRVVTLNARSHLRARV
QAQSTNDGLDFQX₈SQLVKKLVEPPPQGX₉QGSVISFPSPRSGPGSPAQW
LLYTHPTHSWQRADLGAYLNPRPPAPEAWSEPX₁₀LLAKGSX₁₁AYSDLQS
MGTGPDGSPLFGX₁₂LYEANDYEEIVFLMFTLKQAFPAEYLPQ

(SEQ ID NO: 76), wherein X₁ is Ala, Arg, Asn, Asp, Gln, Glu, Gly, His, Leu, Lys, Met, Phe, Thr, Val, or not present, X₂ is Ala or Lys, X₃ is Asn or Leu, X₄ is Phe, Trp, Tyr or Val, X₅ is Ala, Cys, Ile, Ser, or Val, X₆ is Arg, Ile, or Lys, X₇ is Ala, Cys, Leu, or Val, X₈ is Glu or Lys, X₉ is Cys or Val, X₁₀ is Lys or Val, X₁₁ is Ala, Cys, Ser, or Val, and X₁₂ is Cys, Leu, or Val, and the sialidase comprises at least one mutation relative to wild-type human Neu2 (SEQ ID NO: 2).

[0083] In certain embodiments, the sialidase comprises the amino acid sequence of

X₁ASLPX₂LQKESVFQSGAHAYRIPALLYLPGQQSLLAFAEQRASKKDEH
AELIVLRRGDYDAPTHQVQWQAQEVVAQARLDGHRSMNPCPLYDAQTGT
LFLFFIAIPGQVTEQQQLQTRANVTRLCQVTSTDHGRTWSSPRDLTDAA
IGPAYREWSTFAVGPGHCLQLHDRARSLVVPAYAYRKLHPX₃QRPIPSA
FCFLSHDHGRTWARGHFVAQDTLECQVAEVETGEQRVVTLNARSHLRAR
VQAQSTNDGLDFQESQLVKKLVEPPPQGCQGSVISFPSPRSGPGSPAQW
LLYTHPTHSWQRADLGAYLNPRPPAPEAWSEPVLLAKGSX₄AYSDLQSM
GTGPDGSPLFGCLYEANDYEEIVFLMFTLKQAFPAEYLPQ

(SEQ ID NO: 73), wherein X₁ is Ala, Asn, Asp, His, Leu, Met, Phe, Thr, or not present, X₂ is Phe, Trp, Tyr or Val, X₃ is Arg, Ile, or Lys, and X₄ is Ala, Cys, Ser, or Val, and the sialidase comprises at least one mutation relative to wild-type human Neu2 (SEQ ID NO: 2). In certain embodiments, X₁ is Ala, Asp, Met, or not present, X₂ is Tyr or Val, X₃ is Ile or Lys, and X₄ is Ala or Cys.

[0084] In certain embodiments, the recombinant mutant human sialidase comprises the amino acid sequence of

X₁X₂SX₃X₄X₅LQX₆ESVFQSGAHAYRIPALLYLPGQQSLLAFAEQRASX₇
X₈DEHAELIVX₉RRGDYDAX₁₀THQVQWX₁₁AQEVVAQAX₁₂LDGHRSMNP
CPLYDX₁₃QTGTLFLFFIAIPX₁₄X₁₅VTEX₁₆QQLQTRANVTRLX₁₇X₁₈V
TSTDHGRTWSSPRDLTDAAIGPX₁₉YREWSTFAVGPGHX₂₀LQLHDRX₂₁
RSLVVPAYAYRKLHPX₂₂QRPIPSAFX₂₃FLSHDHGRTWARGHFVAQDT
X₂₄ECQVAEVETGEQRVVTLNARSHLRARVQAQSX₂₅NX₂₆GLDFQX₂₇S
QLVKKLVEPPPX₂₈GX₂₉QGSVISFPSPRSGPGSPAQX₃₀LLYTHPTHX₃₁
X₃₂QRADLGAYLNPRPPAPEAWSEPX₃₃LLAKGSX₃₄AYSDLQSMGTGPD
GSPLFGX₃₅LYEANDYEEIX₃₆FX₃₇MFTLKQAFPAEYLPQ

(SEQ ID NO: 81), wherein X₁ is Ala, Arg, Asn, Asp, Gln, Glu, Gly, His, Leu, Lys, Met, Phe, Thr, Val, or not present, X₂ is Ala or Lys, X₃ is Asn or Leu, X₄ is Pro or His, X₅ is Phe, Trp, Tyr or Val, X₆ is Lys or Asp. X₇ is Lys, Arg, or Glu. X₈ is Lys, Ala, Arg, or Glu, X₉ is Leu or Met, X₁₀ is Pro, Asn, Asp, His, Glu, Gly, Ser or Thr, X₁₁ is Gln or His, X₁₂ is Arg or Lys, X₁₃ is Ala, Glu or Lys, X₁₄ is Gly or Asp, X₁₅ is Gln or His, X₁₆ is Gln, Arg, or Lys, X₁₇ is Ala, Cys, Ile, Ser, Val, or Leu, X₁₈ is Gln or Leu, X₁₉ is Ala or Val, X₂₀ is Cys or Gly, X₂₁ is Ala or Gly, X₂₂ is Arg, Ile, or Lys, X₂₃ is Ala, Cys, Leu, or Val, X₂₄ is Leu, Ala, or Val, X₂₅ is Thr or Ala, X₂₆ is Asp or Gly, X₂₇ is Glu or Lys, X₂₈ is Gln, Ala, His, Phe, or Pro, X₂₉ is Cys or Val, X₃₀ is Trp or Arg, X₃₁ is Ser or Arg, X₃₂ is Trp or Lys, X₃₃ is Lys or Val, X₃₄ is Ala, Cys, Ser, or Val, X₃₅ is Cys, Leu, or Val, X₃₅ is Val or Arg, and X₃₇ is Leu, Gln, His, Ile, Lys, or Ser, and the sialidase comprises at least one mutation relative to wild-type human Neu2 (SEQ ID NO: 2).

[0085] In certain embodiments, the recombinant mutant human sialidase comprises the amino acid sequence of

X₁ASLPX₂LQX₃ESVFQSGAHAYRIPALLYLPGQQSLLAFAEQRASKKDEH
AELIVLRRGDYDAX₄THQVQWQAQEVVAQARLDGHRSMNPCPLYDX₅QTG
TLFLFFIAIPGQVTEQQQLQTRANVTRLCQVTSTDHGRTWSSPRDLTDA
AIGPAYREWSTFAVGPGHCLQLHDRARSLVVPAYAYRKLHPX₆QRPIPS
AFCFLSHDHGRTWARGHFVAQDTLECQVAEVETGEQRVVTLNARSHLRA
RVQAQSTNDGLDFQESQLVKKLVEPPPX₇GCQGSVISFPSPRSGPGSPAQ
WLLYTHPTHX₈X₉QRADLGAYLNPRPPAPEAWSEPVLLAKGSX₁₀AYSDLQ
SMGTGPDGSPLFGCLYEANDYEEIX₁₁FX₁₂MFTLKQAFPAEYLPQ

(SEQ ID NO: 82), wherein X₁ is Ala, Arg, Asn, Asp, Gln, Glu, Gly, His, Leu, Lys, Met, Phe, Thr, Val, or not present, X₂ is Phe, Trp, Tyr or Val, X₃ is Lys or Asp, X₄ is Pro, Asn, Asp, His, Glu, Gly, Ser or Thr, X₅ is Ala, Glu, or Lys, X₆ is Arg, Ile, or Lys, X₇ is Gln, Ala, His, Phe, or Pro, X₈ is Ser or Arg, X₉ is Trp or Lys, X₁₀ is Ala, Cys, Ser, or Val, X₁₁ is Val or Arg, and X₁₂ is Leu, Gln, His, Ile, Lys, or Ser, and the sialidase comprises at least one mutation relative to wild-type human Neu2 (SEQ ID NO: 2). In certain embodiments, X₁ is Ala, Asp, Met, or not present, X₂ is Tyr or Val, X₃ is Lys or Asp, X₄ is Pro, Asn, Gly, Ser or Thr, X₅ is Ala or Glu, X₆ is Ile or Lys, X₇ is Gln or Ala, X₈ is Ser or Arg, X₉ is Trp or Lys, X₁₀ is Ala or Cys, X₁₁ is Val or Arg, and X₁₂ is Leu or Ile.

[0086] In certain embodiments, the recombinant mutant human sialidase comprises a conservative substitution relative to a recombinant mutant human sialidase sequence disclosed herein. As used herein, the term “conservative substitution” refers to a substitution with a structurally similar amino acid. For example, conservative substitutions may include those within the following groups: Ser and Cys; Leu, Ile, and Val; Glu and Asp; Lys and Arg; Phe, Tyr, and Trp; and Gln, Asn, Glu, Asp, and His. Conservative substitutions may also be defined by the BLAST (Basic Local Alignment Search Tool) algorithm, the BLOSUM substitution matrix (e.g., BLOSUM 62 matrix), or the PAM substitution:p matrix (e.g., the PAM 250 matrix).

### Sialidase Fusion Proteins/Antibody Conjugates

[0087] In certain embodiments, a sialidase is fused to a portion or fragment of an antibody, such as an immunoglobulin Fc domain (also referred to herein as an Fc domain), or an immunoglobulin antigen-binding domain (also referred to herein as an antigen-binding domain). In certain embodiments, the sialidase and antibody or portion thereof (e.g., immunoglobulin Fc domain or antigen-binding domain) are linked by a peptide bond or an amino acid linker.

[0088] As used herein, unless otherwise indicated, the term “fusion protein” is understood to refer to a single polypeptide chain comprising amino acid sequences based upon two or more separate proteins or polypeptide chains, where the two amino acid sequences may be fused together directly or via an intervening linker sequence, e.g., via an intervening amino acid linker. A nucleotide sequence encoding a fusion protein can, for example, be created using conventional recombinant DNA technologies.

[0089] In certain embodiments, the fusion protein comprises a tag, such as a Strep tag (e.g., a Strep II tag), a His tag (e.g., a 10× His tag (SEQ ID NO: 157)), a myc tag, or a FLAG tag. The tag can be located on the C-terminus or the N-terminus of the fusion protein. In certain embodiments, a fusion protein comprises a sialidase portion joined to a polypeptide comprising an immunoglobulin heavy chain in an N- to C-terminal orientation, wherein the sialidase portion comprises an N-terminal addition of MEDLRP (SEQ ID NO: 17), and a Strep II Tag is located on the C-terminus of the immunoglobulin heavy chain or the N-terminus of the sialidase portion.

[0090] The sialidase portion of a fusion protein described herein can be any sialidase disclosed herein, e.g., a fungal, bacterial, non-human mammalian or human sialidase. In certain embodiments, the sialidase portion is a sialidase comprising at least one mutation relative to a wild-type human sialidase, e.g., a substitution, deletion, or addition of at least one amino acid, as described above.

[0091] As used herein, unless otherwise indicated, the term “antibody” is understood to mean an intact antibody (e.g., an intact monoclonal antibody), or a fragment thereof, such as a Fc fragment of an antibody (e.g., an Fc fragment of a monoclonal antibody), or an antigen-binding fragment of an antibody (e.g., an antigen-binding fragment of a monoclonal antibody), including an intact antibody, antigen-binding fragment, or Fc fragment that has been modified, engineered, or chemically conjugated. Examples of antigen-binding fragments include Fab, Fab′, (Fab′)₂, Fv, single chain antibodies (e.g., scFv), minibodies, and diabodies. Examples of antibodies that have been modified or engineered include chimeric antibodies, humanized antibodies, and multispecific antibodies (e.g., bispecific antibodies). An example of a chemically conjugated antibody is an antibody conjugated to a toxin moiety.

[0092] In certain embodiments, the fusion protein comprises an immunoglobulin Fc domain. As used herein, unless otherwise indicated, the term “immunoglobulin Fc domain” refers to a fragment of an immunoglobulin heavy chain constant region which, either alone or in combination with a second immunoglobulin Fc domain, is capable of binding to an Fc receptor. An immunoglobulin Fc domain may include, e.g., immunoglobulin CH2 and CH3 domains. An immunoglobulin Fc domain may include, e.g., immunoglobulin CH2 and CH3 domains and an immunoglobulin hinge region. Boundaries between immunoglobulin hinge regions, CH2, and CH3 domains are well known in the art, and can be found, e.g., in the PROSITE database (available on the world wide web at prosite.expasy.org).

[0093] In certain embodiments, the immunoglobulin Fc domain is derived from a human IgG1, IgG2, IgG3, IgG4, IgA1, IgA2, IgD, IgE, and IgM Fc domain. A single amino acid substitution (S228P according to Kabat numbering; designated IgG4Pro) may be introduced to abolish the heterogeneity observed in recombinant IgG4 antibody. See Angal, S. et al. (1993) MOL. IMMUNOL. 30:105-108.

[0094] In certain embodiments, the immunoglobulin Fc domain is derived from a human IgG1 isotype or another isotype that elicits antibody-dependent cell-mediated cytotoxicity (ADCC) and/or complement mediated cytotoxicity (CDC). In certain embodiments, the immunoglobulin Fc domain is derived from a human IgG1 isotype (e.g., SEQ ID NO: 29 or SEQ ID NO: 62).

[0095] In certain embodiments, the immunoglobulin Fc domain is derived from a human IgG4 isotype or another isotype that elicits little or no antibody-dependent cell-mediated cytotoxicity (ADCC) and/or complement mediated cytotoxicity (CDC). In certain embodiments, the immunoglobulin Fc domain is derived from a human IgG4 isotype.

[0096] In certain embodiments, the immunoglobulin Fc domain comprises either a “knob” mutation, e.g., T366Y or a “hole” mutation, e.g., Y407T for heterodimerization with a second polypeptide (residue numbers according to EU numbering, Kabat, E. A., et al. (1991) SEQUENCES OF PROTEINS OF IMMUNOLOGICAL INTEREST, FIFTH EDITION, U.S. Department of Health and Human Services, NIH Publication No. 91-3242).

[0097] In certain embodiments, the fusion protein comprises an immunoglobulin antigen-binding domain. The inclusion of such a domain may improve targeting of a fusion protein to a sialylated cancer cell and/or to the tumor microenvironment. As used herein, unless otherwise indicated, the term “immunoglobulin antigen-binding domain” refers to a polypeptide that, alone or in combination with another immunoglobulin antigen-binding domain, defines an antigen-binding site. Exemplary immunoglobulin antigen-binding domains include, for example, immunoglobulin heavy chain variable region and an immunoglobulin light chain variable region, where the variable regions together define an antigen binding site.

[0098] The immunoglobulin antigen-binding domain and/or antigen binding site can be derived from an antibody selected from, for example, adecatumumab, ascrinvacumab, cixutumumab, conatumumab, daratumumab, drozitumab, duligotumab, durvalumab, dusigitumab, enfortumab, enoticumab, epratuxumab, figitumumab, ganitumab, glembatumumab, intetumumab, ipilimumab, iratumumab, icrucumab, lexatumumab, lucatumumab, mapatumumab, narnatumab, necitumumab, nesvacumab, ofatumumab, olaratumab, panitumumab, patritumab, pritumumab, radretumab, ramucirumab, rilotumumab, robatumumab, seribantumab, tarextumab, teprotumumab, tovetumab, vantictumab, vesencumab, votumumab, zalutumumab, flanvotumab, altumomab, anatumomab, arcitumomab, bectumomab, blinatumomab, detumomab, ibritumomab, minretumomab, mitumomab, moxetumomab, naptumomab, nofetumomab, pemtumomab, pintumomab, racotumomab, satumomab, solitomab, taplitumomab, tenatumomab, tositumomab, tremelimumab, abagovomab, atezolizumab, durvalumab, avelumab, igovomab, oregovomab, capromab, edrecolomab, nacolomab, amatuximab, bavituximab, brentuximab, cetuximab, derlotuximab, dinutuximab, ensituximab, futuximab, girentuximab, indatuximab, isatuximab, margetuximab, rituximab, siltuximab, ublituximab, ecromeximab, abituzumab, alemtuzumab, bevacizumab, bivatuzumab, brontictuzumab, cantuzumab, cantuzumab, citatuzumab, clivatuzumab, dacetuzumab, demcizumab, dalotuzumab, denintuzumab, elotuzumab, emactuzumab, emibetuzumab, enoblituzumab, etaracizumab, farletuzumab, ficlatuzumab, gemtuzumab, imgatuzumab, inotuzumab, labetuzumab, lifastuzumab, lintuzumab, lirilumab, lorvotuzumab, lumretuzumab, matuzumab, milatuzumab, moxetumomab, nimotuzumab, obinutuzumab, ocaratuzumab, otlertuzumab, onartuzumab, oportuzumab, parsatuzumab, pertuzumab, pidilizumab, pinatuzumab, polatuzumab, sibrotuzumab, simtuzumab, tacatuzumab, tigatuzumab, trastuzumab, tucotuzumab, urelumab, vandortuzumab, vanucizumab, veltuzumab, vorsetuzumab, sofituzumab, catumaxomab, ertumaxomab, depatuxizumab, ontuxizumab, blontuvetmab, tamtuvetmab, nivolumab, pembrolizumab, epratuzumab, MEDI9447, urelumab, utomilumab, hu3F8, hu14.18-IL-2, 3F8/OKT3BsAb, lirilumab, BMS-986016 pidilizumab, AMP-224, AMP-514, BMS-936559, atezolizumab, and avelumab. In certain embodiments, the immunoglobulin antigen-binding domain can be derived from an antibody selected from trastuzumab, cetuximab, daratumumab, girentuximab, panitumumab, ofatumumab, and rituximab.

[0099] In certain embodiments, the immunoglobulin antigen-binding domain is derived from trastuzumab. The trastuzumab heavy chain amino acid sequence is depicted in SEQ ID NO: 40, and the trastuzumab light chain amino acid sequence is depicted in SEQ ID NO: 41. The amino acid sequence of an exemplary scFv derived from trastuzumab is depicted in SEQ ID NO: 42.

[0100] The immunoglobulin antigen-binding domain and/or antigen binding site can be derived from an antibody that binds a cancer antigen selected from, for example, adenosine A2a receptor (A2aR), A kinase anchor protein 4 (AKAP4), B melanoma antigen (BAGE), brother of the regulator of imprinted sites (BORIS), breakpoint cluster region Abelson tyrosine kinase (BCR/ABL), CA125, CAIX, CD19, CD20, CD22, CD30, CD33, CD52, CD73, CD137, carcinoembryonic antigen (CEA), CS1, cytotoxic T-lymphocyte-associated antigen 4 (CTLA-4), estrogen receptor binding site associated antigen 9 (EBAG9), epidermal growth factor (EGF), epidermal growth factor receptor (EGFR), epithelial cell adhesion molecule (EpCAM) (17-1A), FR-alpha, G antigen (GAGE), disialoganglioside GD2 (GD2), glycoprotein 100 (gp100), human epidermal growth factor receptor 2 (Her2), hepatocyte growth factor (HGF), human papillomavirus 16 (HPV-16), heat-shock protein 105 (HSP105), isocitrate dehydrogenase type 1 (IDH1), idiotype (NeuGcGM3), indoleamine-2,3-dioxygenase 1 (IDO1), IGF-1, IGF1R, IGG1K, killer cell immunoglobulin-like receptor (KIR), lymphocyte activation gene 3 (LAG-3), lymphocyte antigen 6 complex K (LY6K), melanoma antigen 3 (MAGE-A3), melanoma antigen C2 (MAGE-C2), melanoma antigen D4 (MAGE-D4), melanoma antigen recognized by T-cells 1 (Melan-A/MART-1), N-methyl-N′-nitroso-guanidine human osteosarcoma transforming gene (MET), mucin 1 (MUC1), mucin 4 (MUC4), mucin 16 (MUC16), New York esophageal squamous cell carcinoma 1 (NY-ESO-1), prostatic acid phosphatase (PAP), programmed cell death receptor 1 (PD-1), programmed cell death receptor ligand 1 (PD-L1), phosphatidylserine, preferentially expressed antigen of melanoma (PRAME), prostate specific antigen (PSA), receptor tyrosine kinase orphan receptor 1 (ROR1), scatter factor receptor kinase, sialyl-Tn, sperm-associated antigen 9 (SPAG-9), synovial sarcoma X-chromosome breakpoint 1 (SSX1), survivin, telomerase, T-cell immunoglobulin domain and mucin domain-3 (TIM-3), vascular endothelial growth factor (VEGF) (e.g., VEGF-A), vascular endothelial growth factor Receptor 2 (VEGFR2), V-domain immunoglobulin-containing suppressor of T-cell activation (VISTA), Wilms' Tumor-1 (WT1), X chromosome antigen 1b (XAGE-1b), 5T4, Mesothelin, Glypican 3 (GPC3), Folate Receptor α (FRα), Prostate Specific Membrane Antigen (PSMA), cMET, CD38, B Cell Maturation Antigen (BCMA), CD123, Siglec7 and Siglec9.

[0101] The disclosure further provides antibody conjugates containing one or more of the fusion proteins disclosed herein. As used herein, unless otherwise indicated, the term “antibody conjugate” is understood to refer to an antibody, or a functional fragment thereof, that comprises antigen-binding activity and/or Fc receptor-binding activity, conjugated (e.g., covalently coupled) to an additional functional moiety. In certain embodiments, the antibody or functional antibody fragment is conjugated to a sialidase enzyme, e.g., a sialidase enzyme disclosed herein. In certain embodiments, an antibody conjugate comprises a single polypeptide chain. In certain embodiments, an antibody conjugate comprises two, three, four, or more polypeptide chains that are covalently or non-covalently associated together to produce a multimeric complex, e.g., a dimeric, trimeric or tetrameric complex.

[0102] TABLE 1 shows antibodies and antibody-drug conjugates suitable for use in accordance with the present invention, the antigen bound by the antibody or antibody-drug conjugate, and for certain antibodies, the type of cancer targeted by the antibody or antibody-drug conjugate.

TABLE 1

| Antibody or antibody- | | |
|---|---|---|
| drug conjugate | Cancer Antigen | Cancer Type |
| oregovomab | CA125 | |
| girentuximab | CAIX | |
| obinutuzumab | CD20 | |
| ofatumumab | CD20 | |
| rituximab | CD20 | |
| alemtuzumab | CD52 | |
| ipilimumab | cytotoxic T-lymphocyte-associated | |
| | antigen 4 (CTLA-4) | |
| tremelimumab | CTLA-4 | |
| Cetuximab | epidermal growth factor receptor | |
| | (EGFR) | |
| necitumumab | EGFR | |
| panitumumab | EGFR | |
| zalutumumab | EGFR | |
| edrecolomab | epithelial cell adhesion molecule | |
| | (EpCAM) (17-1A) | |
| farletuzumab | FR-alpha | |
| pertuzumab | human epidermal growth factor | |
| | receptor 2 (Her2) | |
| trastuzumab | Her2 | |
| rilotumumab | HGF | |
| figitumumab | IGF-1 | |
| Ganitumab | IGF1R | |
| durvalumab | IGG1K | |
| bavituximab | Phosphatidylserine | |
| onartuzumab | scatter factor receptor kinase | |
| bevacizumab | vascular endothelial growth factor-A | |
| | (VEGF-A) | |
| ramucirumab | vascular endothelial growth factor | |
| | Receptor 2 (VEGFR2) | |
| blinatumomab | CD19 | acute lymphoblastic leukemia |
| | | (ALL) |
| Rituximab; | CD20 | non-Hodgkin's lymphoma |
| ofatumumab; | | (NHL), chronic lymphocytic |
| ibritumomab (e.g., ⁹⁰Y- | | leukemia (CLL) |
| ibritumomab; | | B-cell NHL |
| tositumomab (e.g., ¹³¹I- | | pre-B ALL |
| tositumomab | | |
| brentuximab (e.g., | CD30 | Hodgkin's lymphoma |
| brentuximab vedotin | | |
| gemtuzumab (e.g., | CD33 | acute myelogenous leukemia |
| gemtuzumab ozogamicin | | (AML) |
| Alemtuzumab | CD52 | CLL |
| Ipilimumab | cytotoxic T-lymphocyte-associated | Unresectable or metastatic |
| | antigen 4 (CTLA-4) | melanoma |
| cetuximab; | epidermal growth factor receptor | colorectal cancer (CRC) |
| panitumumab | (EGFR) | Head and Neck |
| Catumaxomab | epithelial cell adhesion molecule | Malignant ascites |
| | (EpCAM) | |
| trastuzumab; | human epidermal growth factor | Breast |
| pertuzumab | receptor 2 (HER2) | |
| nivolumab; | programmed cell death receptor 1 | Metastatic melanoma, non- |
| pembrolizumab | (PD-1) | small cell lung cancer |
| | | (NSCLC) |
| Bevacizumab | vascular endothelial growth factor | Breast, Cervical |
| | (VEGF) | CRC, NSCLC |
| | | renal cell carcinoma (RCC), |
| | | Ovarian |
| | | Glioblastoma |
| Ramucirumab | vascular endothelial growth factor | Gastric |
| | receptor 2 (VEGF-R2) | NSCLC |
| Epratuzumab; | CD22 | acute lymphoblastic leukemia |
| moxetumomab; | | (ALL) |
| inotuzumab (e.g., | | |
| inotuzumab ozogamicin) | | |
| MEDI9447 | CD73 | Advanced solid tumors |
| Urelumab; | CD137 | Advanced solid tumors |
| utomilumab (PF- | | |
| 05082566) | | |
| Elotuzumab | CD2 subset 1 (CS1) | Multiple myeloma |
| Tremelimumab | cytotoxic T-lymphocyte-associated | Malignant mesothelioma |
| | antigen 4 (CTLA-4) | |
| Necitumumab | epidermal growth factor receptor | non-small cell lung cancer |
| | (EGFR) | (NSCLC) |
| dinutuximab; hu3F8; | disialoganglioside GD2 (GD2) | Neuroblastoma |
| hu14.18-IL-2; | | Retinoblastoma |
| 3F8/OKT3BsAb | | Melanoma other solid tumors |
| Racotumomab | Idiotype (NeuGcGM3) | NSCLC, Breast |
| | | Melanoma |
| Lirilumab | killer cell immunoglobulin-like | Lymphoma |
| | receptor (KIR) | |
| BMS-986016 | lymphocyte activation gene 3 (LAG- | Breast, Hematological, |
| | 3) | Advanced solid tumors |
| Onartuzumab | N-methyl-N′-nitroso-guanidine | NSCLC |
| | human osteosarcoma transforming | |
| | gene (MET) | |
| abagovomab; | mucin 16 (MUC16) | Ovarian |
| oregovomab | | |
| pidilizumab; | programmed cell death receptor 1 | B-cell lymphoma |
| AMP-224; AMP-514 | (PD-1) | Melanoma, CRC |
| BMS-936559; | programmed cell death receptor | NSCLC, renal cell carcinoma |
| atezolizumab; | ligand 1 (PD-L1) | (RCC) |
| durvalumab; avelumab | | Bladder, Breast |
| | | Melanoma, squamous cell |
| | | carcinoma of the head and |
| | | neck (SCCHN) |
| naptumomab (e.g., | 5T4 | RCC, CRC |
| naptumomab estafenatox | | Prostate |

[0103] In certain embodiments, the sialidase portion of the fusion protein can be linked or fused directly to the antibody portion (e.g., immunoglobulin Fc domain and/or immunoglobulin antigen-binding domain) of the fusion protein. In other embodiments, the sialidase portion can be covalently bound to the antibody portion by a linker.

[0104] The linker may couple, with one or more natural amino acids, the sialidase, or functional fragment thereof, and the antibody portions or fragments, where the amino acid (for example, a cysteine amino acid) may be introduced by site-directed mutagenesis. The linker may include one or more unnatural amino acids. It is contemplated that, in certain circumstances, a linker containing for example, one or more sulfhydryl reactive groups (e.g., a maleimide) may covalently link a cysteine in the sialidase portion or the antibody portion that is a naturally occurring cysteine residue or is the product of site-specific mutagenesis.

[0105] The linker may be a cleavable linker or a non-cleavable linker. Optionally or in addition, the linker may be a flexible linker or an inflexible linker.

[0106] The linker should be a length sufficiently long to allow the sialidase and the antibody portions to be linked without steric hindrance from one another and sufficiently short to retain the intended activity of the fusion protein. The linker preferably is sufficiently hydrophilic to avoid or minimize instability of the fusion protein. The linker preferably is sufficiently hydrophilic to avoid or minimize insolubility of the fusion protein. The linker should be sufficiently stable in vivo (e.g., it is not cleaved by serum, enzymes, etc.) to permit the fusion protein to be operative in vivo.

[0107] The linker may be from about 1 angstroms (Å) to about 150 Å in length, or from about 1 Å to about 120 Å in length, or from about 5 Å to about 110 Å in length, or from about 10 Å to about 100 Å in length. The linker may be greater than about 2, 3, 4, 5, 6, 7, 8, 9, 10, 11, 12, 13, 14, 15, 16, 17, 18, 19, 20, 25, 27, 30 or greater angstroms in length and/or less than about 110, 100, 90, 85, 80, 75, 70, 65, 60, 55, 50, 45, 43, 42, 41, 40, 39, 38, 37, 36, 35, 34, 33, 32, 31, or fewer A in length. Furthermore, the linker may be about 5, 10, 15, 20, 25, 30, 35, 40, 45, 50, 55, 60, 65, 70, 75, 80, 85, 90, 95, 100, 110, and 120 Å in length.

[0108] In certain embodiments, the linker comprises a polypeptide linker that connects or fuses the sialidase portion of the fusion protein to the antibody portion (e.g., immunoglobulin Fc domain and/or immunoglobulin antigen-binding domain) of the fusion protein. For example, it is contemplated that a gene encoding a sialidase portion linked directly or indirectly (for example, via an amino acid containing linker) to an antibody portion can be created and expressed using conventional recombinant DNA technologies. For example, the amino terminus of a sialidase portion can be linked to the carboxy terminus of either the light or the heavy chain of an antibody portion. For example, for a Fab fragment, the amino terminus or carboxy terminus of the sialidase can be linked to the first constant domain of the heavy antibody chain (CH1). When a linker is employed, the linker may comprise hydrophilic amino acid residues, such as Gln, Ser, Gly, Glu, Pro, His and Arg. In certain embodiments, the linker is a peptide containing 1-25 amino acid residues, 1-20 amino acid residues, 2-15 amino acid residues, 3-10 amino acid residues, 3-7 amino acid residues, 4-25 amino acid residues, 4-20 amino acid residues, 4-15 amino acid residues, 4-10 amino acid residues, 5-25 amino acid residues, 5-20 amino acid residues, 5-15 amino acid residues, or 5-10 amino acid residues. Exemplary linkers include glycine and serine-rich linkers, e.g., (GlyGlyPro)ₙ (SEQ ID NO: 158), or (GlyGlyGlyGlySer)ₙ (SEQ ID NO: 159), where n is 1-5. In certain embodiments, the linker is (Gly₄Ser)₂ (SEQ ID NO: 160). Additional exemplary linker sequences are disclosed, e.g., in George et al. (2003) Protein Engineering 15:871-879, and U.S. Pat. Nos. 5,482,858 and 5,525,491.

[0109] In certain embodiments, the fusion protein comprises any one of SEQ ID NOs: 43-54, 67-72, 90-96, 99-105, or 108-155, or an amino acid sequence that has at least 85%, 90%, 95%, 96%, 97%, 98%, or 99% sequence identity to any one of SEQ ID NOs: 43-54, 67-72, 90-96, 99-105, or 108-155.

[0110] In certain embodiments, a sialidase for use in the invention is an antibody conjugate comprising a fusion protein disclosed herein. The antibody conjugate may comprise a single polypeptide chain (i.e., a fusion protein disclosed herein) or, the antibody conjugate may comprise additional polypeptide chains (e.g., one, two, or three additional polypeptide chains). For example, an antibody conjugate may comprise a first polypeptide (fusion protein) comprising a sialidase enzyme and an immunoglobulin heavy chain, and a second polypeptide comprising an immunoglobulin light chain, where, for example, the immunoglobulin heavy and light chains together define a single antigen-binding site.

[0111] In certain embodiments, the antibody conjugate can include a single sialidase. In other embodiments, the antibody conjugate can include more than one (e.g., two) sialidases. If more than one sialidase is included, the sialidases can be the same or different. In certain embodiments, the antibody conjugate can include a single antigen-binding site. In other embodiments, the antibody conjugate can include more than one (e.g., two) antigen-binding sites. If two antigen-binding sites are used, they can be the same or different. In certain embodiments, the antibody conjugate comprises an immunoglobulin Fc fragment.

[0112] In certain embodiments, the antibody conjugate comprises one or two immunoglobulin heavy chains, or a functional fragment thereof. In certain embodiments, the antibody conjugate comprises one or two immunoglobulin light chains, or a functional fragment thereof. In certain embodiments, the antibody conjugate comprises a sialidase fused to the N- or C-terminus of an immunoglobulin heavy chain or an immunoglobulin light chain.

[0113] In certain embodiments, the antibody conjugate comprises a first polypeptide comprising a first immunoglobulin light chain; a second polypeptide comprising a first immunoglobulin heavy chain and a first sialidase; a third polypeptide comprising a second immunoglobulin heavy chain and a second sialidase; and a fourth polypeptide comprising a second immunoglobulin light chain. An example of this embodiment is shown in FIG. 1A. The first and second polypeptides can be covalently linked together, the third and fourth polypeptides can be covalently linked together, and the second and third polypeptides can be covalently linked together. The covalent linkages can be disulfide bonds. In certain embodiments, the first polypeptide and the second polypeptide together define a first antigen-binding site, and the third polypeptide and the fourth polypeptide together define a second antigen-binding site. In certain embodiments, the second and third polypeptides comprise the first and second immunoglobulin heavy chain and the first and second sialidase, respectively, in an N- to C-terminal orientation. In certain embodiments, the second and third polypeptides comprise the first and second sialidase and the first and second immunoglobulin heavy chain, respectively, in an N- to C-terminal orientation.

[0114] In certain embodiments, the antibody conjugate comprises a first polypeptide comprising an immunoglobulin light chain; a second polypeptide comprising an immunoglobulin heavy chain; and a third polypeptide comprising an immunoglobulin Fc domain and a sialidase. An example of this embodiment is shown in FIG. 1B. The first and second polypeptides can be covalently linked together and the second and third polypeptides can be covalently linked together. The covalent linkages can be disulfide bonds. In certain embodiments, the first polypeptide and the second polypeptide together define an antigen-binding site. In certain embodiments, the third polypeptide comprises the sialidase and the immunoglobulin Fc domain in an N- to C-terminal orientation or the immunoglobulin Fc domain and the sialidase in an N- to C-terminal orientation.

[0115] In certain embodiments, the first polypeptide comprises the amino acid sequence of SEQ ID NO: 49, or an amino acid sequence that has at least 85%, 90%, 95%, 96%, 97%, 98%, or 99% sequence identity to SEQ ID NO: 49. In certain embodiments, the second polypeptide comprises the amino acid sequence of SEQ ID NO: 50 or an amino acid sequence that has at least 85%, 90%, 95%, 96%, 97%, 98%, or 99% sequence identity to SEQ ID NO: 50. In certain embodiments, the third polypeptide comprises the amino acid sequence of SEQ ID NO: 51, SEQ ID NO: 52, SEQ ID NO: 53, SEQ ID NO: 54, SEQ ID NO: 69, SEQ ID NO: 70, SEQ ID NO: 71, SEQ ID NO: 72, SEQ ID NO: 90, SEQ ID NO: 91, SEQ ID NO: 92, SEQ ID NO: 93, SEQ ID NO: 94, SEQ ID NO: 95, SEQ ID NO: 96, SEQ ID NO: 108, SEQ ID NO: 111, SEQ ID NO: 112, SEQ ID NO: 113, SEQ ID NO: 114, SEQ ID NO: 115, SEQ ID NO: 116, SEQ ID NO: 117, SEQ ID NO: 118, SEQ ID NO: 119, SEQ ID NO: 120, SEQ ID NO: 121, SEQ ID NO: 122, SEQ ID NO: 123, SEQ ID NO: 124, or SEQ ID NO: 125, or an amino acid sequence that has at least 85%, 90%, 95%, 96%, 97%, 98%, or 99% sequence identity to SEQ ID NO: 51, SEQ ID NO: 52, SEQ ID NO: 53, SEQ ID NO: 54, SEQ ID NO: 69, SEQ ID NO: 70, SEQ ID NO: 71, SEQ ID NO: 72, SEQ ID NO: 90, SEQ ID NO: 91, SEQ ID NO: 92, SEQ ID NO: 93, SEQ ID NO: 94, SEQ ID NO: 95, SEQ ID NO: 96, SEQ ID NO: 108, SEQ ID NO: 111, SEQ ID NO: 112, SEQ ID NO: 113, SEQ ID NO: 114, SEQ ID NO: 115, SEQ ID NO: 116, SEQ ID NO: 117, SEQ ID NO: 118, SEQ ID NO: 119, SEQ ID NO: 120, SEQ ID NO: 121, SEQ ID NO: 122, SEQ ID NO: 123, SEQ ID NO: 124, or SEQ ID NO: 125.

[0116] In certain embodiments, the third polypeptide comprises the amino acid sequence of

X₁X₂SX₃PX₄LQKESVFQSGAHAYRIPALLYLPGQQSLLAFAEQRASKKDE
HAELIVLRRGDYDAPTHQVQWQAQEVVAQARLDGHRSMNPCPLYDAQTG
TLFLFFIAIPGQVTEQQQLQTRANVTRLX₅QVTSTDHGRTWSSPRDLTD
AAIGPAYREWSTFAVGPGHCLQLHDRARSLVVPAYAYRKLHPX₆QRPIP
SAFX₇FLSHDHGRTWARGHFVAQDTLECQVAEVETGEQRVVTLNARSHLR
ARVQAQSTNDGLDFQX₈SQLVKKLVEPPPQGX₉QGSVISFPSPRSGPGSP
AQWLLYTHPTHSWQRADLGAYLNPRPPAPEAWSEPX₁₀LLAKGSX₁₁AYS
DLQSMGTGPDGSPLFGX₁₂LYEANDYEEIVFLMFTLKQAFPAEYLPQGGG
GSGGGGSDKTHTCPPCPAPELLGGPSVFLFPPKPKDTLMISRTPEVTCV
VVDVSHEDPEVKFNWYVDGVEVHNAKTKPREEQYNSTYRVVSVLTVLHQ
DWLNGKEYKCKVSNKALPAPIEKTISKAKGQPREPQVYTLPPSREEMTK
NQVSLTCLVKGFYPSDIAVEWESNGQPENNYKTTPPVLDSDGSFFLTSK
LTVDKSRWQQGNVFSCSVMHEALHNHYTQKSLSLSPGK

(SEQ ID NO: 77), wherein X₁ is Ala, Arg, Asn, Asp, Gln, Glu, Gly, His, Leu, Lys, Met, Phe, Thr, Val, or not present, X₂ is Ala or Lys, X₃ is Asn or Leu, X₄ is Phe, Trp, Tyr or Val, X₅ is Ala, Cys, Ile, Ser, or Val, X₆ is Arg, Ile, or Lys, X₇ is Ala, Cys, Leu, or Val, X₈ is Glu or Lys, X₉ is Cys or Val, X₁₀ is Lys or Val, X₁₁ is Ala, Cys, Ser, or Val, and X₁₂ is Cys, Leu, or Val.

[0117] In certain embodiments, the third polypeptide comprises the amino acid sequence of

X₁ASLPX₂LQKESVFQSGAHAYRIPALLYLPGQQSLLAFAEQRASKKDEH
AELIVLRRGDYDAPTHQVQWQAQEVVAQARLDGHRSMNPCPLYDAQTGT
LFLFFIAIPGQVTEQQQLQTRANVTRLCQVTSTDHGRTWSSPRDLTDAA
IGPAYREWSTFAVGPGHCLQLHDRARSLVVPAYAYRKLHPX₃QRPIPSA
FCFLSHDHGRTWARGHFVAQDTLECQVAEVETGEQRVVTLNARSHLRAR
VQAQSTNDGLDFQESQLVKKLVEPPPQGCQGSVISFPSPRSGPGSPAQW
LLYTHPTHSWQRADLGAYLNPRPPAPEAWSEPVLLAKGSX₄AYSDLQSM
GTGPDGSPLFGCLYEANDYEEIVFLMFTLKQAFPAEYLPQGGGGSGGGG
SDKTHTCPPCPAPELLGGPSVFLFPPKPKDTLMISRTPEVTCVVVDVSH
EDPEVKFNWYVDGVEVHNAKTKPREEQYNSTYRVVSVLTVLHQDWLNGK
EYKCKVSNKALPAPIEKTISKAKGQPREPQVYTLPPSREEMTKNQVSLT
CLVKGFYPSDIAVEWESNGQPENNYKTTPPVLDSDGSFFLTSKLTVDKS
RWQQGNVFSCSVMHEALHNHYTQKSLSLSPGK

(SEQ ID NO: 74), wherein X₁ is Ala, Asn, Asp, His, Leu, Met, Phe, Thr, or not present, X₂ is Phe, Trp, Tyr or Val, X₃ is Arg, Ile, or Lys, and X₄ is Ala, Cys, Ser, or Val. In certain embodiments, X₁ is Ala, Asp, Met, or not present, X₂ is Tyr or Val, X₃ is Ile or Lys, and X₄ is Ala or Cys.

[0118] In certain embodiments, the third polypeptide comprises the amino acid sequence of

X₁X₂SX₃X₄X₅LQX₆ESVFQSGAHAYRIPALLYLPGQQSLLAFAEQRASX₇
X₈DEHAELIVX₉RRGDYDAX₁₀THQVQWX₁₁AQEVVAQAX₁₂LDGHRSMNP
CPLYDX₁₃QTGTLFLFFIAIPX₁₄X₁₅VTEX₁₆QQLQTRANVTRLX₁₇X₁₈V
TSTDHGRTWSSPRDLTDAAIGPX₁₉YREWSTFAVGPGHX₂₀LQLHDRX₂₁
RSLVVPAYAYRKLHPX₂₂QRPIPSAFX₂₃FLSHDHGRTWARGHFVAQDT
X₂₄ECQVAEVETGEQRVVTLNARSHLRARVQAQSX₂₅NX₂₆GLDFQX₂₇S
QLVKKLVEPPPX₂₈GX₂₉QGSVISFPSPRSGPGSPAQX₃₀LLYTHPTH
X₃₁X₃₂QRADLGAYLNPRPPAPEAWSEPX₃₃LLAKGSX₃₄AYSDLQSMGT
GPDGSPLFGX₃₅LYEANDYEEIX₃₆FX₃₇MFTLKQAFPAEYLPQX₃₈DKT
HTCPPCPAPELLGGPSVFLFPPKPKDTLMISRTPEVTCVVVDVSHED
PEVKFNWYVDGVEVHNAKTKPREEQYNSTYRVVSVLTVLHQDWLNGK
EYKCKVSNKALPAPIEKTISKAKGQPREPQVYTLPPSREEMTKNQVS
LTCLVKGFYPSDIAVEWESNGQPENNYKTTPPVLDSDGSFFLTSKLT
VDKSRWQQGNVFSCSVMHEALHNHYTQKSLSLSPGK

(SEQ ID NO: 98), wherein X₁ is Ala, Arg, Asn, Asp, Gln, Glu, Gly, His, Leu, Lys, Met, Phe, Thr, Val, or not present, X₂ is Ala or Lys, X₃ is Asn or Leu, X₄ is Pro or His, X₅ is Phe, Trp, Tyr or Val, X₆ is Lys or Asp. X₇ is Lys, Arg, or Glu. X₈ is Lys, Ala, Arg, or Glu, X₉ is Leu or Met, X₁₀ is Pro, Asn, Asp, His, Glu, Gly, Ser or Thr, X₁₁ is Gln or His, X₁₂ is Arg or Lys, X₁₃ is Ala, Glu or Lys, X₁₄ is Gly or Asp, X₁₅ is Gln or His, X₁₆ is Gln, Arg, or Lys, X₁₇ is Ala, Cys, Ile, Ser, Val, or Leu, X₁₈ is Gln or Leu, X₁₉ is Ala or Val, X₂₀ is Cys or Gly, X₂₁ is Ala or Gly, X₂₂ is Arg, Ile, or Lys, X₂₃ is Ala, Cys, Leu, or Val, X₂₄ is Leu, Ala, or Val, X₂₅ is Thr or Ala, X₂₆ is Asp or Gly, X₂₇ is Glu or Lys, X₂₈ is Gln, Ala, His, Phe, or Pro, X₂₉ is Cys or Val, X₃₀ is Trp or Arg, X₃₁ is Ser or Arg, X₃₂ is Trp or Lys, X₃₃ is Lys or Val, X₃₄ is Ala, Cys, Ser, or Val, X₃₅ is Cys, Leu, or Val, X₃₅ is Val or Arg, X₃₇ is Leu, Gln, His, Ile, Lys, or Ser, and X₃₈ is GGGGSGGGGS or EPKSS, and the sialidase comprises at least one mutation relative to wild-type human Neu2 (SEQ ID NO: 2).

[0119] In certain embodiments, the third polypeptide comprises the amino acid sequence of

X₁ASLPX₂LQX₃ESVFQSGAHAYRIPALLYLPGQQSLLAFAEQRASKKDE
HAELIVLRRGDYDAX₄THQVQWQAQEVVAQARLDGHRSMNPCPLYDX₅Q
TGTLFLFFIAIPGQVTEQQQLQTRANVTRLCQVTSTDHGRTWSSPRDL
TDAAIGPAYREWSTFAVGPGHCLQLHDRARSLVVPAYAYRKLHPX₆QRP
IPSAFCFLSHDHGRTWARGHFVAQDTLECQVAEVETGEQRVVTLNARSH
LRARVQAQSTNDGLDFQESQLVKKLVEPPPX₇GCQGSVISFPSPRSGPG
SPAQWLLYTHPTHX₈X₉QRADLGAYLNPRPPAPEAWSEPVLLAKGSX₁₀A
YSDLQSMGTGPDGSPLFGCLYEANDYEEIX₁₁FX₁₂MFTLKQAFPAEYLP
QX₁₃DKTHTCPPCPAPELLGGPSVFLFPPKPKDTLMISRTPEVTCVVVD
VSHEDPEVKFNWYVDGVEVHNAKTKPREEQYNSTYRVVSVLTVLHQDW
LNGKEYKCKVSNKALPAPIEKTISKAKGQPREPQVYTLPPSREEMTKN
QVSLTCLVKGFYPSDIAVEWESNGQPENNYKTTPPVLDSDGSFFLTSK
LTVDKSRWQQGNVFSCSVMHEALHNHYTQKSLSLSPGK

(SEQ ID NO: 97), wherein X₁ is Ala, Arg, Asn, Asp, Gln, Glu, Gly, His, Leu, Lys, Met, Phe, Thr, Val, or not present, X₂ is Phe, Trp, Tyr or Val, X₃ is Lys or Asp, X₄ is Pro, Asn, Asp, His, Glu, Gly, Ser or Thr, X₅ is Ala, Glu, or Lys, X₆ is Arg, Ile, or Lys, X₇ is Gln, Ala, His, Phe, or Pro, X₈ is Ser or Arg, X₉ is Trp or Lys, X₁₀ is Ala, Cys, Ser, or Val, X₁₁ is Val or Arg, X₁₂ is Leu, Gln, His, Ile, Lys, or Ser, and X₁₃ is GGGGSGGGGS or EPKSS, and the sialidase comprises at least one mutation relative to wild-type human Neu2 (SEQ ID NO: 2). In certain embodiments, X₁ is Ala, Asp, Met, or not present, X₂ is Tyr or Val, X₃ is Lys or Asp, X₄ is Pro, Asn, Gly, Ser or Thr, X₅ is Ala or Glu, X₆ is Ile or Lys, X₇ is Gln or Ala, X₈ is Ser or Arg, X₉ is Trp or Lys, X₁₀ is Ala or Cys, X₁₁ is Val or Arg, and X₁₂ is Leu or Ile.

[0120] In certain embodiments, the first polypeptide comprises SEQ ID NO: 49, the second polypeptide comprises SEQ ID NO: 50, and the third polypeptide comprises SEQ ID NO: 51. In certain embodiments, the first polypeptide comprises SEQ ID NO: 49, the second polypeptide comprises SEQ ID NO: 50, and the third polypeptide comprises SEQ ID NO: 52. In certain embodiments, the first polypeptide comprises SEQ ID NO: 49, the second polypeptide comprises SEQ ID NO: 50, and the third polypeptide comprises SEQ ID NO: 53. In certain embodiments, the first polypeptide comprises SEQ ID NO: 49, the second polypeptide comprises SEQ ID NO: 50, and the third polypeptide comprises SEQ ID NO: 54. In certain embodiments, the first polypeptide comprises SEQ ID NO: 49, the second polypeptide comprises SEQ ID NO: 50, and the third polypeptide comprises SEQ ID NO: 69. In certain embodiments, the first polypeptide comprises SEQ ID NO: 49, the second polypeptide comprises SEQ ID NO: 50, and the third polypeptide comprises SEQ ID NO: 70. In certain embodiments, the first polypeptide comprises SEQ ID NO: 49, the second polypeptide comprises SEQ ID NO: 50, and the third polypeptide comprises SEQ ID NO: 71. In certain embodiments, the first polypeptide comprises SEQ ID NO: 49, the second polypeptide comprises SEQ ID NO: 50, and the third polypeptide comprises SEQ ID NO: 72. In certain embodiments, the first polypeptide comprises SEQ ID NO: 49, the second polypeptide comprises SEQ ID NO: 50, and the third polypeptide comprises SEQ ID NO: 90. In certain embodiments, the first polypeptide comprises SEQ ID NO: 49, the second polypeptide comprises SEQ ID NO: 50, and the third polypeptide comprises SEQ ID NO: 91. In certain embodiments, the first polypeptide comprises SEQ ID NO: 49, the second polypeptide comprises SEQ ID NO: 50, and the third polypeptide comprises SEQ ID NO: 92. In certain embodiments, the first polypeptide comprises SEQ ID NO: 49, the second polypeptide comprises SEQ ID NO: 50, and the third polypeptide comprises SEQ ID NO: 93. In certain embodiments, the first polypeptide comprises SEQ ID NO: 49, the second polypeptide comprises SEQ ID NO: 50, and the third polypeptide comprises SEQ ID NO: 94. In certain embodiments, the first polypeptide comprises SEQ ID NO: 49, the second polypeptide comprises SEQ ID NO: 50, and the third polypeptide comprises SEQ ID NO: 95. In certain embodiments, the first polypeptide comprises SEQ ID NO: 49, the second polypeptide comprises SEQ ID NO: 50, and the third polypeptide comprises SEQ ID NO: 96. In certain embodiments, the first polypeptide comprises SEQ ID NO: 49, the second polypeptide comprises SEQ ID NO: 50, and the third polypeptide comprises SEQ ID NO: 108. In certain embodiments, the first polypeptide comprises SEQ ID NO: 49, the second polypeptide comprises SEQ ID NO: 50, and the third polypeptide comprises SEQ ID NO: 111. In certain embodiments, the first polypeptide comprises SEQ ID NO: 49, the second polypeptide comprises SEQ ID NO: 50, and the third polypeptide comprises SEQ ID NO: 112. In certain embodiments, the first polypeptide comprises SEQ ID NO: 49, the second polypeptide comprises SEQ ID NO: 50, and the third polypeptide comprises SEQ ID NO: 113. In certain embodiments, the first polypeptide comprises SEQ ID NO: 49, the second polypeptide comprises SEQ ID NO: 50, and the third polypeptide comprises SEQ ID NO: 114. In certain embodiments, the first polypeptide comprises SEQ ID NO: 49, the second polypeptide comprises SEQ ID NO: 50, and the third polypeptide comprises SEQ ID NO: 115. In certain embodiments, the first polypeptide comprises SEQ ID NO: 49, the second polypeptide comprises SEQ ID NO: 50, and the third polypeptide comprises SEQ ID NO: 116. In certain embodiments, the first polypeptide comprises SEQ ID NO: 49, the second polypeptide comprises SEQ ID NO: 50, and the third polypeptide comprises SEQ ID NO: 117. In certain embodiments, the first polypeptide comprises SEQ ID NO: 49, the second polypeptide comprises SEQ ID NO: 50, and the third polypeptide comprises SEQ ID NO: 118. In certain embodiments, the first polypeptide comprises SEQ ID NO: 49, the second polypeptide comprises SEQ ID NO: 50, and the third polypeptide comprises SEQ ID NO: 119. In certain embodiments, the first polypeptide comprises SEQ ID NO: 49, the second polypeptide comprises SEQ ID NO: 50, and the third polypeptide comprises SEQ ID NO: 120. In certain embodiments, the first polypeptide comprises SEQ ID NO: 49, the second polypeptide comprises SEQ ID NO: 50, and the third polypeptide comprises SEQ ID NO: 121. In certain embodiments, the first polypeptide comprises SEQ ID NO: 49, the second polypeptide comprises SEQ ID NO: 50, and the third polypeptide comprises SEQ ID NO: 122. In certain embodiments, the first polypeptide comprises SEQ ID NO: 49, the second polypeptide comprises SEQ ID NO: 50, and the third polypeptide comprises SEQ ID NO: 123. In certain embodiments, the first polypeptide comprises SEQ ID NO: 49, the second polypeptide comprises SEQ ID NO: 50, and the third polypeptide comprises SEQ ID NO: 124. In certain embodiments, the first polypeptide comprises SEQ ID NO: 49, the second polypeptide comprises SEQ ID NO: 50, and the third polypeptide comprises SEQ ID NO: 125.

[0121] In certain embodiments, the antibody conjugate comprises a first polypeptide comprising a first sialidase, a first immunoglobulin Fc domain, and a first single chain variable fragment (scFv) (it is also understood that the scFv may be replaced by a first polypeptide chain of an immunoglobulin antigen binding fragment, e.g., Fab fragment); and a second polypeptide comprising a second sialidase, a second immunoglobulin Fc domain, and an optional second single chain variable fragment (scFv) (it is also understood that the scFv may be replaced by a second polypeptide chain of an immunoglobulin antigen binding fragment, e.g., Fab fragment). An example of this embodiment is shown in FIG. 1C. The first and second polypeptides can be covalently linked together. The covalent linkages can be disulfide bonds. In certain embodiments, the first scFv defines a first antigen-binding site, and the second scFv, when present, defines a second antigen-binding site. In certain embodiments, the first polypeptide comprises the first sialidase, the first immunoglobulin Fc domain, and the first scFv in an N- to C-terminal orientation. In certain embodiments, the first polypeptide comprises the first scFv, the first immunoglobulin Fc domain, and the first sialidase in an N- to C-terminal orientation. In certain embodiments, the second polypeptide comprises the second sialidase, the second immunoglobulin Fc domain, and the optional second scFv in an N- to C-terminal orientation. In certain embodiments, the second polypeptide comprises the second scFv, the second immunoglobulin Fc domain, and the second sialidase in an N- to C-terminal orientation.

[0122] In certain embodiments, the first polypeptide comprises the amino acid sequence of SEQ ID NO: 43, SEQ ID NO: 44, SEQ ID NO: 45, SEQ ID NO: 46, SEQ ID NO: 47, SEQ ID NO: 48, SEQ ID NO: 67, SEQ ID NO: 68, SEQ ID NO: 99, SEQ ID NO: 100, SEQ ID NO: 101, SEQ ID NO: 102, SEQ ID NO: 103, SEQ ID NO: 104, SEQ ID NO: 105, or SEQ ID NO: 110, or an amino acid sequence that has at least 85%, 90%, 95%, 96%, 97%, 98%, or 99% sequence identity to SEQ ID NO: 43, SEQ ID NO: 44, SEQ ID NO: 45, SEQ ID NO: 46, SEQ ID NO: 47, SEQ ID NO: 48, SEQ ID NO: 67, SEQ ID NO: 68, SEQ ID NO: 99, SEQ ID NO: 100, SEQ ID NO: 101, SEQ ID NO: 102, SEQ ID NO: 103, SEQ ID NO: 104, SEQ ID NO: 105, or SEQ ID NO: 110. In certain embodiments, the second polypeptide comprises the amino acid sequence of SEQ ID NO: 43, SEQ ID NO: 44, SEQ ID NO: 45, SEQ ID NO: 46, SEQ ID NO: 47, SEQ ID NO: 48, SEQ ID NO: 67, SEQ ID NO: 68, SEQ ID NO: 99, SEQ ID NO: 100, SEQ ID NO: 101, SEQ ID NO: 102, SEQ ID NO: 103, SEQ ID NO: 104, SEQ ID NO: 105, or SEQ ID NO: 110, or an amino acid sequence that has at least 85%, 90%, 95%, 96%, 97%, 98%, or 99% sequence identity to SEQ ID NO: 43, SEQ ID NO: 44, SEQ ID NO: 45, SEQ ID NO: 46, SEQ ID NO: 47, SEQ ID NO: 48, SEQ ID NO: 67, SEQ ID NO: 68, SEQ ID NO: 99, SEQ ID NO: 100, SEQ ID NO: 101, SEQ ID NO: 102, SEQ ID NO: 103, SEQ ID NO: 104, SEQ ID NO: 105, or SEQ ID NO: 110.

[0123] In certain embodiments, the first and/or second polypeptide comprises the amino acid sequence of

X₁X₂SX₃PX₄LQKESVFQSGAHAYRIPALLYLPGQQSLLAFAEQRASKKDE
HAELIVLRRGDYDAPTHQVQWQAQEVVAQARLDGHRSMNPCPLYDAQTGT
LFLFFIAIPGQVTEQQQLQTRANVTRLX₅QVTSTDHGRTWSSPRDLTDAA
IGPAYREWSTFAVGPGHCLQLHDRARSLVVPAYAYRKLHPX₆QRPIPSAF
X₇FLSHDHGRTWARGHFVAQDTLECQVAEVETGEQRVVTLNARSHLRARV
QAQSTNDGLDFQX₈SQLVKKLVEPPPQGX₉QGSVISFPSPRSGPGSPAQWL
LYTHPTHSWQRADLGAYLNPRPPAPEAWSEPX₁₀LLAKGSX₁₁AYSDLQSM
GTGPDGSPLFGX₁₂LYEANDYEEIVFLMFTLKQAFPAEYLPQGGGGSGGGG
SDKTHTCPPCPAPELLGGPSVFLFPPKPKDTLMISRTPEVTCVVVDVSHE
DPEVKFNWYVDGVEVHNAKTKPREEQYNSTYRVVSVLTVLHQDWLNGKEY
KCKVSNKALPAPIEKTISKAKGQPREPQVYTLPPSREEMTKNQVSLTCLV
KGFYPSDIAVEWESNGQPENNYKTTPPVLDSDGSFFLYSKLTVDKSRWQQ
GNVFSCSVMHEALHNHYTQKSLSLSPGKGGGGSGGGGSGGGGSEVQLVES
GGGLVQPGGSLRLSCAASGFNIKDTYIHWVRQAPGKGLEWVARIYPTNGY
TRYADSVKGRFTISADTSKNTAYLQMNSLRAEDTAVYYCSRWGGDGFYAM
DYWGQGTLVTVSSGGGGSGGGGSGGGGSDIQMTQSPSSLSASVGDRVTIT
CRASQDVNTAVAWYQQKPGKAPKLLIYSASFLYSGVPSRFSGSRSGTDFT
LTISSLQPEDFATYYCQQHYTTPPTFGQGTKVEIK

(SEQ ID NO: 78), wherein X₁ is Ala, Arg, Asn, Asp, Gln, Glu, Gly, His, Leu, Lys, Met, Phe, Thr, Val, or not present, X₂ is Ala or Lys, X₃ is Asn or Leu, X₄ is Phe, Trp, Tyr or Val, X₅ is Ala, Cys, Ile, Ser, or Val, X₆ is Arg, Ile, or Lys, X₇ is Ala, Cys, Leu, or Val, X₈ is Glu or Lys, X₉ is Cys or Val, X₁₀ is Lys or Val, X₁₁ is Ala, Cys, Ser, or Val, and X₁₂ is Cys, Leu, or Val.

[0124] In certain embodiments, the first and/or second polypeptide comprises the amino acid sequence of

X₁ASLPX₂LQKESVFQSGAHAYRIPALLYLPGQQSLLAFAEQRASKKDEH
AELIVLRRGDYDAPTHQVQWQAQEVVAQARLDGHRSMNPCPLYDAQTGT
LFLFFIAIPGQVTEQQQLQTRANVTRLCQVTSTDHGRTWSSPRDLTDAA
IGPAYREWSTFAVGPGHCLQLHDRARSLVVPAYAYRKLHPX₃QRPIPSA
FCFLSHDHGRTWARGHFVAQDTLECQVAEVETGEQRVVTLNARSHLRAR
VQAQSTNDGLDFQESQLVKKLVEPPPQGCQGSVISFPSPRSGPGSPAQW
LLYTHPTHSWQRADLGAYLNPRPPAPEAWSEPVLLAKGSX₄AYSDLQSM
GTGPDGSPLFGCLYEANDYEEIVFLMFTLKQAFPAEYLPQGGGGSGGGG
SDKTHTCPPCPAPELLGGPSVFLFPPKPKDTLMISRTPEVTCVVVDVSH
EDPEVKFNWYVDGVEVHNAKTKPREEQYNSTYRVVSVLTVLHQDWLNGK
EYKCKVSNKALPAPIEKTISKAKGQPREPQVYTLPPSREEMTKNQVSLT
CLVKGFYPSDIAVEWESNGQPENNYKTTPPVLDSDGSFFLYSKLTVDKS
RWQQGNVFSCSVMHEALHNHYTQKSLSLSPGKGGGGSGGGGSGGGGSEV
QLVESGGGLVQPGGSLRLSCAASGFNIKDTYIHWVRQAPGKGLEWVARI
YPTNGYTRYADSVKGRFTISADTSKNTAYLQMNSLRAEDTAVYYCSRWG
GDGFYAMDYWGQGTLVTVSSGGGGSGGGGSGGGGSDIQMTQSPSSLSAS
VGDRVTITCRASQDVNTAVAWYQQKPGKAPKLLIYSASFLYSGVPSRFS
GSRSGTDFTLTISSLQPEDFATYYCQQHYTTPPTFGQGTKVEIK

(SEQ ID NO: 75), wherein X₁ is Ala, Asn, Asp, His, Leu, Met, Phe, Thr, or not present, X₂ is Phe, Trp, Tyr or Val, X₃ is Arg, Ile, or Lys, and X₄ is Ala, Cys, Ser, or Val. In certain embodiments, X₁ is Ala, Asp, Met, or not present, X₂ is Tyr or Val, X₃ is Ile or Lys, and X₄ is Ala or Cys.

[0125] In certain embodiments, the first and/or second polypeptide comprises the amino acid sequence of

X₁X₂SX₃X₄X₅LQXESVFQSGAHAYRIPALLYLPGQQSLLAFAEQRASX₇X₈
DEHAELIVX₉RRGDYDAX₁₀THQVQWX₁₁AQEVVAQAX₁₂LDGHRSMNPCPL
YDX₁₃QTGTLFLFFIAIPX₁₄X₁₅VTEX₁₆QQLQTRANVTRLX₁₇X₁₈VTSTDH
GRTWSSPRDLTDAAIGPX₁₉YREWSTFAVGPGHX₂₀LQLHDRX₂₁RSLVVPA
YAYRKLHPX₂₂QRPIPSAFX₂₃FLSHDHGRTWARGHFVAQDTX₂₄ECQVAEV
ETGEQRVVTLNARSHLRARVQAQSX₂₅NX₂₆GLDFQX₂₇SQLVKKLVEPPP
X₂₈GX₂₉QGSVISFPSPRSGPGSPAQX₃₀LLYTHPTHX₃₁X₃₂QRADLGAYLN
PRPPAPEAWSEPX₃₃LLAKGSX₃₄AYSDLQSMGTGPDGSPLFGX₃₅LYEAND
YEEIX₃₆FX₃₇MFTLKQAFPAEYLPQGGGGSGGGGSDKTHTCPPCPAPELL
GGPSVFLFPPKPKDTLMISRTPEVTCVVVDVSHEDPEVKFNWYVDGVEV
HNAKTKPREEQYNSTYRVVSVLTVLHQDWLNGKEYKCKVSNKALPAPIE
KTISKAKGQPREPQVYTLPPSREEMTKNQVSLTCLVKGFYPSDIAVEWE
SNGQPENNYKTTPPVLDSDGSFFLYSKLTVDKSRWQQGNVFSCSVMHEA
LHNHYTQKSLSLSPGKGGGGSGGGGSGGGGSEVQLVESGGGLVQPGGSL
RLSCAASGFNIKDTYIHWVRQAPGKGLEWVARIYPTNGYTRYADSVKGR
FTISADTSKNTAYLQMNSLRAEDTAVYYCSRWGGDGFYAMDYWGQGTLV
TVSSGGGGSGGGGSGGGGSDIQMTQSPSSLSASVGDRVTITCRASQDVN
TAVAWYQQKPGKAPKLLIYSASFLYSGVPSRFSGSRSGTDFTLTISSLQ
PEDFATYYCQQHYTTPPTFGQGTKVEIK

(SEQ ID NO: 107), wherein X₁ is Ala, Arg, Asn, Asp, Gln, Glu, Gly, His, Leu, Lys, Met, Phe, Thr, Val, or not present, X₂ is Ala or Lys, X₃ is Asn or Leu, X₄ is Pro or His, X₅ is Phe, Trp, Tyr or Val, X₆ is Lys or Asp. X₇ is Lys, Arg, or Glu. X₈ is Lys, Ala, Arg, or Glu, X₉ is Leu or Met, X₁₀ is Pro, Asn, Asp, His, Glu, Gly, Ser or Thr, X₁₁ is Gln or His, X₁₂ is Arg or Lys, X₁₃ is Ala, Glu or Lys, X₁₄ is Gly or Asp, X₁₅ is Gln or His, X₁₆ is Gln, Arg, or Lys, X₁₇ is Ala, Cys, Ile, Ser, Val, or Leu, X₁₈ is Gln or Leu, X₁₉ is Ala or Val, X₂₀ is Cys or Gly, X₂₁ is Ala or Gly, X₂₂ is Arg, Ile, or Lys, X₂₃ is Ala, Cys, Leu, or Val, X₂₄ is Leu, Ala, or Val, X₂₅ is Thr or Ala, X₂₆ is Asp or Gly, X₂₇ is Glu or Lys, X₂₈ is Gln, Ala, His, Phe, or Pro, X₂₉ is Cys or Val, X₃₀ is Trp or Arg, X₃₁ is Ser or Arg, X₃₂ is Trp or Lys, X₃₃ is Lys or Val, X₃₄ is Ala, Cys, Ser, or Val, X₃₅ is Cys, Leu, or Val, X₃₅ is Val or Arg, and X₃₇ is Leu, Gln, His, Ile, Lys, or Ser, and the sialidase comprises at least one mutation relative to wild-type human Neu2 (SEQ ID NO: 2).

[0126] In certain embodiments, the first and/or second polypeptide comprises the amino acid sequence of

X₁ASLPX₂LQX₃ESVFQSGAHAYRIPALLYLPGQQSLLAFAEQRASKKDE
HAELIVLRRGDYDAX₄THQVQWQAQEVVAQARLDGHRSMNPCPLYDX₅QT
GTLFLFFIAIPGQVTEQQQLQTRANVTRLCQVTSTDHGRTWSSPRDLTD
AAIGPAYREWSTFAVGPGHCLQLHDRARSLVVPAYAYRKLHPX₆QRPIP
SAFCFLSHDHGRTWARGHEVAQDTLECQVAEVETGEQRVVTLNARSHLR
ARVQAQSTNDGLDFQESQLVKKLVEPPPX₇GCQGSVISFPSPRSGPGSP
AQWLLYTHPTHX₈X₉QRADLGAYLNPRPPAPEAWSEPVLLAKGSX₁₀AYS
DLQSMGTGPDGSPLFGCLYEANDYEEIX₁₁FX₁₂MFTLKQAFPAEYLPQG
GGGSGGGGSDKTHTCPPCPAPELLGGPSVFLFPPKPKDTLMISRTPEVT
CVVVDVSHEDPEVKFNWYVDGVEVHNAKTKPREEQYNSTYRVVSVLTVL
HQDWLNGKEYKCKVSNKALPAPIEKTISKAKGQPREPQVYTLPPSREEM
TKNQVSLTCLVKGFYPSDIAVEWESNGQPENNYKTTPPVLDSDGSFFLY
SKLTVDKSRWQQGNVFSCSVMHEALHNHYTQKSLSLSPGKGGGGSGGGG
SGGGGSEVQLVESGGGLVQPGGSLRLSCAASGFNIKDTYIHWVRQAPGK
GLEWVARIYPTNGYTRYADSVKGRFTISADTSKNTAYLQMNSLRAEDTA
VYYCSRWGGDGFYAMDYWGQGTLVTVSSGGGGSGGGGSGGGGSDIQMTQ
SPSSLSASVGDRVTITCRASQDVNTAVAWYQQKPGKAPKLLIYSASFLY
SGVPSRFSGSRSGTDFTLTISSLQPEDFATYYCQQHYTTPPTFGQGTKV
EIK

(SEQ ID NO: 106), wherein X₁ is Ala, Arg, Asn, Asp, Gln, Glu, Gly, His, Leu, Lys, Met, Phe, Thr, Val, or not present, X₂ is Phe, Trp, Tyr or Val, X₃ is Lys or Asp, X₄ is Pro, Asn, Asp, His, Glu, Gly, Ser or Thr, X₅ is Ala, Glu, or Lys, X₆ is Arg, Ile, or Lys, X₇ is Gln, Ala, His, Phe, or Pro, X₈ is Ser or Arg, X₉ is Trp or Lys, X₁₀ is Ala, Cys, Ser, or Val, X₁₁ is Val or Arg, and X₁₂ is Leu, Gln, His, Ile, Lys, or Ser, and the sialidase comprises at least one mutation relative to wild-type human Neu2 (SEQ ID NO: 2). In certain embodiments, X₁ is Ala, Asp, Met, or not present, X₂ is Tyr or Val, X₃ is Lys or Asp, X₄ is Pro, Asn, Gly, Ser or Thr, X₅ is Ala or Glu, X₆ is Ile or Lys, X₇ is Gln or Ala, X₈ is Ser or Arg, X₉ is Trp or Lys, X₁₀ is Ala or Cys, X₁₁ is Val or Arg, and X₁₂ is Leu or Ile.

[0127] In certain embodiments, the first and second polypeptide comprise SEQ ID NO: 43. In certain embodiments, the first and second polypeptide comprise SEQ ID NO: 44. In certain embodiments, the first and second polypeptide comprise SEQ ID NO: 45. In certain embodiments, the first and second polypeptide comprise SEQ ID NO: 46. In certain embodiments, the first and second polypeptide comprise SEQ ID NO: 47. In certain embodiments, the first and second polypeptide comprise SEQ ID NO: 48. In certain embodiments, the first and second polypeptide comprise SEQ ID NO: 67. In certain embodiments, the first and second polypeptide comprise SEQ ID NO: 68. In certain embodiments, the first and second polypeptide comprise SEQ ID NO: 99. In certain embodiments, the first and second polypeptide comprise SEQ ID NO: 100. In certain embodiments, the first and second polypeptide comprise SEQ ID NO: 101. In certain embodiments, the first and second polypeptide comprise SEQ ID NO: 102. In certain embodiments, the first and second polypeptide comprise SEQ ID NO: 103. In certain embodiments, the first and second polypeptide comprise SEQ ID NO: 104. In certain embodiments, the first and second polypeptide comprise SEQ ID NO: 105. In certain embodiments, the first and second polypeptide comprise SEQ ID NO: 110.

[0128] In certain embodiments, the antibody conjugate has a molecular weight from about 135 kDa to about 165 kDa, e.g., about 140 kDa. In other embodiments, the antibody conjugate has a molecular weight from about 215 kDa to about 245 kDa, e.g., about 230 kDa.

[0129] In certain embodiments, the antibody conjugate comprises two polypeptides that each comprise an immunoglobulin Fc domain, and the first polypeptide has either a “knob” mutation, e.g., T366Y, or a “hole” mutation, e.g., Y407T, for heterodimerization with the second polypeptide, and the second polypeptide has either a respective “knob” mutation, e.g., T366Y, or a “hole” mutation, e.g., Y407T, for heterodimerization with the first polypeptide (residue numbers according to EU numbering, Kabat, E. A., et al. (1991) supra). For example, in certain embodiments, the antibody comprises two polypeptides that each comprise an immunoglobulin Fc domain derived from human IgG1 Fc domain, and the first polypeptide comprises a Y407T mutation (e.g., the first polypeptide comprises SEQ ID NO: 30), and the second polypeptide comprises a T366Y mutation (e.g., the second polypeptide comprises SEQ ID NO: 31).

[0130] As used herein, the term “multispecific antibody” is understood to mean an antibody that specifically binds to at least two different antigens, i.e., an antibody that comprises at least two antigen-binding sites that bind to at least two different antigens. As used herein, the term “bispecific antibody” is understood to mean an antibody that specifically binds to two different antigens, i.e., an antibody that comprises two antigen-binding sites each of which bind to separate and distinct antigens. In other words, a first binding site binds a first antigen and a second binding site binds a second, different antigen. A multispecific or bispecific antibody may, for example, be a human or humanized antibody, and/or be a full length antibody or an antibody fragment (e.g., a F(ab′)₂ bispecific antibody).

[0131] The present disclosure encompasses antibody conjugates comprising antibody fragments, which may be generated by traditional means, such as enzymatic digestion, or by recombinant techniques. For a review of certain antibody fragments, see Hudson et al. (2003) supra.

[0132] In certain embodiments, the antibody conjugate or fusion protein can be covalently or non-covalently associated with a biological modifier, wherein the biological modifier can be used to enhance the solubility of the antibody, increase binding specificity, decrease immunogenicity or toxicity or modify the pharmacokinetic profile of the antibody. For example, the biological modifier can be used to increase the molecular weight of the antibody to increase its circulating half-life.

[0133] It is contemplated that the antibody conjugate or fusion protein may be covalently bound to one or more (for example, 2, 3, 4, 5, 6, 8, 9, 10 or more) biological modifiers that may comprise linear or branched polymers. Exemplary biological modifiers may include, for example, a variety of polymers, such as those described in U.S. Pat. No. 7,842,789. Particularly useful are polyalkylene ethers such as polyethylene glycol (PEG) and derivatives thereof (for example, alkoxy polyethylene glycol, for example, methoxypolyethylene glycol, ethoxypolyethylene glycol and the like); block copolymers of polyoxyethylene and polyoxypropylene (Pluronics); polymethacrylates; carbomers; and branched or unbranched polysaccharides which comprise the saccharide monomers such as D-mannose, D- and L-galactose, fucose, fructose, D-xylose, L-arabinose, and D-glucuronic acid.

[0134] In other embodiments, the biological modifier can be a hydrophilic polyvinyl polymer such as polyvinyl alcohol and polyvinylpyrrolidone (PVP)-type polymers. The biological modifier can be a functionalized polyvinylpyrrolidone, for example, carboxy or amine functionalized on one (or both) ends of the polymer (as available from PolymerSource). Alternatively, the biological modifier can include Poly N-(2-hydroxypropyl)methacrylamide (HPMA), or functionalized HPMA (amine, carboxy, etc.), Poly(N-isopropylacrylamide) or functionalized poly(N-isopropylacrylamide). Alternatively, the biological modifier can include Poly N-(2-hydroxypropyl)methacrylamide (HPMA), or functionalized HPMA (amine, carboxy, etc.), Poly(N-isopropylacrylamide) or functionalized poly(N-isopropylacrylamide). The modifier prior to conjugation need not be, but preferably is, water soluble, but the final conjugate should be water soluble.

[0135] In general, the biological modifier may have a molecular weight from about 2 kDa to about 5 kDa, from about 2 kDa to about 10 kDa, from about 2 kDa to about 20 kDa, from about 2 kDa to about 30 kDa, from about 2 kDa to about 40 kDa, from about 2 kDa to about 50 kDa, from about 2 kDa to about 60 kDa, from about 2 kDa to about 70 kDa, from about 2 kDa to about 80 kDa, from about 2 kDa to about 90 kDa, from about 2 kDa to about 100 kDa, from about 2 kDa to about 150 kDa, from about 5 kDa to about 10 kDa, from about 5 kDa to about 20 kDa, from about 5 kDa to about 30 kDa, from about 5 kDa to about 40 kDa, from about 5 kDa to about 50 kDa, from about 5 kDa to about 60 kDa, from about 5 kDa to about 70 kDa, from about 5 kDa to about 80 kDa, from about 5 kDa to about 90 kDa, from about 5 kDa to about 100 kDa, from about 5 kDa to about 150 kDa, from about 10 kDa to about 20 kDa, from about 10 kDa to about 30 kDa, from about 10 kDa to about 40 kDa, from about 10 kDa to about 50 kDa, from about 10 kDa to about 60 kDa, from about 10 kDa to about 70 kDa, from about 10 kDa to about 80 kDa, from about 10 kDa to about 90 kDa, from about 10 kDa to about 100 kDa, from about 10 kDa to about 150 kDa, from about 20 kDa to about 30 kDa, from about 20 kDa to about 40 kDa, from about 20 kDa to about 50 kDa, from about 20 kDa to about 60 kDa, from about 20 kDa to about 70 kDa, from about 20 kDa to about 80 kDa, from about 20 kDa to about 90 kDa, from about 20 kDa to about 100 kDa, from about 20 kDa to about 150 kDa, from about 30 kDa to about 40 kDa, from about 30 kDa to about 50 kDa, from about 30 kDa to about 60 kDa, from about 30 kDa to about 70 kDa, from about 30 kDa to about 80 kDa, from about 30 kDa to about 90 kDa, from about 30 kDa to about 100 kDa, from about 30 kDa to about 150 kDa, from about 40 kDa to about 50 kDa, from about 40 kDa to about 60 kDa, from about 40 kDa to about 70 kDa, from about 40 kDa to about 80 kDa, from about 40 kDa to about 90 kDa, from about 40 kDa to about 100 kDa, from about 40 kDa to about 150 kDa, from about 50 kDa to about 60 kDa, from about 50 kDa to about 70 kDa, from about 50 kDa to about 80 kDa, from about 50 kDa to about 90 kDa, from about 50 kDa to about 100 kDa, from about 50 kDa to about 150 kDa, from about 60 kDa to about 70 kDa, from about 60 kDa to about 80 kDa, from about 60 kDa to about 90 kDa, from about 60 kDa to about 100 kDa, from about 60 kDa to about 150 kDa, from about 70 kDa to about 80 kDa, from about 70 kDa to about 90 kDa, from about 70 kDa to about 100 kDa, from about 70 kDa to about 150 kDa, from about 80 kDa to about 90 kDa, from about 80 kDa to about 100 kDa, from about 80 kDa to about 150 kDa, from about 90 kDa to about 100 kDa, from about 90 kDa to about 150 kDa, or from about 100 kDa to about 150 kDa.

[0136] It is contemplated that the antibody conjugate or fusion protein is attached to about 10 or fewer polymer molecules (e.g., 9, 8, 7, 6, 5, 4, 3, 2, or 1), each polymer molecule having a molecular weight of at least about 20,000 D, or at least about 30,000 D, or at least about 40,000 D.

[0137] Although a variety of polymers can be used as biological modifiers, it is contemplated that the antibody conjugates or fusion proteins described herein may be attached to polyethylene glycol (PEG) polymers. In one embodiment, the antibody conjugate or fusion protein described herein is covalently attached to at least one PEG having an actual MW of at least about 20,000 D. In another embodiment, the antibody conjugate or fusion protein described herein is covalently attached to at least one PEG having an actual MW of at least about 30,000 D. In another embodiment, the antibody conjugate or fusion protein described herein is covalently attached to at least one PEG having an actual MW of at least about 40,000 D. In certain embodiments, the PEG is methoxyPEG(5000)-succinimidylpropionate (mPEG-SPA), methoxyPEG(5000)-succinimidylsuccinate (mPEG-SS). Such PEGS are commercially available from Nektar Therapeutics or SunBiowest.

[0138] Attachment sites on an antibody conjugate or fusion protein for a biological modifier include the N-terminal amino group and epsilon amino groups found on lysine residues, as well as other amino, imino, carboxyl, sulfhydryl, hydroxyl or other hydrophilic groups. The polymer may be covalently bonded directly to the antibody conjugate or fusion protein with or without the known use of a multifunctional (ordinarily bifunctional) crosslinking agent using chemistries and used in the art. For example, sulfhydryl groups can be derivatized by coupling to maleimido-substituted PEG (e.g. alkoxy-PEG amine plus sulfosuccinimidyl 4-(N-maleimidomethyl)cyclohexane-1-carboxylate), or PEG-maleimide commercially available from Shearwater Polymers, Inc., Huntsville, Ala.).

[0139] Additional exemplary sialidase fusion proteins and antibody sialidase conjugates are described in U.S. Provisional Patent Application No. 62/870,354, filed Jul. 3, 2019 (including in the Detailed Description in the section entitled “I. Sialidase anti-PD-L1 Fusion Proteins,” and in the Examples in Examples 3 and 4), U.S. Provisional Patent Application No. 62/870,348, filed Jul. 3, 2019 (including in the Detailed Description in the section entitled “I. Sialidase anti-CD20 Fusion Proteins,” and in the Examples in Examples 3, 4, 5, 6, and 7), U.S. Provisional Patent Application No. 62/870,347, filed Jul. 3, 2019 (including in the Detailed Description in the section entitled “I. Sialidase anti-EGFR Fusion Proteins,” and in the Examples in Examples 3, 4, and 5), and U.S. Provisional Patent Application No. 62/870,341, filed Jul. 3, 2019 (including in the Detailed Description in the section entitled “I. Sialidase anti-HER2 Fusion Proteins,” and in the Examples in Examples 3, 4, 5, 6, 7, and 8).

### Methods of Making a Sialidase, Fusion Protein, or Antibody Conjugate

[0140] Methods for producing sialidases, fusion proteins, e.g., those disclosed herein, antibodies, or antibody conjugates, e.g., those disclosed herein, are known in the art. For example, DNA molecules encoding light chain variable regions and/or heavy chain variable regions can be synthesized chemically or by recombinant DNA methodologies. For example, the sequences of the antibodies can be cloned from hybridomas by conventional hybridization techniques or polymerase chain reaction (PCR) techniques, using the appropriate synthetic nucleic acid primers. The resulting DNA molecules encoding the variable regions of interest can be ligated to other appropriate nucleotide sequences, including, for example, constant region coding sequences, and expression control sequences, to produce conventional gene expression constructs (i.e., expression vectors) encoding the desired antibodies. Production of defined gene constructs is within routine skill in the art.

[0141] Nucleic acids encoding desired sialidases, fusion proteins, and/or antibody conjugates can be incorporated (ligated) into expression vectors, which can be introduced into host cells through conventional transfection or transformation techniques. Exemplary host cells are E. coli cells, Chinese hamster ovary (CHO) cells, human embryonic kidney 293 (HEK 293) cells, HeLa cells, baby hamster kidney (BHK) cells, monkey kidney cells (COS), human hepatocellular carcinoma cells (e.g., Hep G2), and myeloma cells that do not otherwise produce IgG protein. Transformed host cells can be grown under conditions that permit the host cells to express the genes that encode the immunoglobulin light and/or heavy chain variable regions.

[0142] Specific expression and purification conditions will vary depending upon the expression system employed. For example, if a gene is to be expressed in E. coli, it is first cloned into an expression vector by positioning the engineered gene downstream from a suitable bacterial promoter, e.g., Trp or Tac, and a prokaryotic signal sequence. The expressed protein may be secreted. The expressed protein may accumulate in refractile or inclusion bodies, which can be harvested after disruption of the cells by French press or sonication. The refractile bodies then are solubilized, and the protein may be refolded and/or cleaved by methods known in the art.

[0143] If the engineered gene is to be expressed in eukaryotic host cells, e.g., CHO cells, it is first inserted into an expression vector containing a suitable eukaryotic promoter, a secretion signal, a poly A sequence, and a stop codon. Optionally, the vector or gene construct may contain enhancers and introns. In embodiments involving fusion proteins comprising an antibody or portion thereof, the expression vector optionally contains sequences encoding all or part of a constant region, enabling an entire, or a part of, a heavy or light chain to be expressed. The gene construct can be introduced into eukaryotic host cells using conventional techniques.

[0144] The host cells express a sialidase or a fusion protein and/or antibody conjugate comprising a sialidase and VL or VH fragments, VL-VH heterodimers, VH-VL or VL-VH single chain polypeptides, complete heavy or light immunoglobulin chains, or portions thereof, each of which may be attached to a moiety having another function (e.g., cytotoxicity). In some embodiments involving fusion proteins and/or antibody conjugates, a host cell is transfected with a single vector expressing a polypeptide expressing a sialidase and an entire, or part of, a heavy chain (e.g., a heavy chain variable region) or a sialidase and a light chain (e.g., a light chain variable region), or a polypeptide expressing an entire, or part of, a heavy chain (e.g., a heavy chain variable region) or a light chain (e.g., a light chain variable region). In some embodiments, a host cell is transfected with a single vector encoding (a) a polypeptide comprising a heavy chain variable region and a polypeptide comprising a light chain variable region, or (b) an entire immunoglobulin heavy chain and an entire immunoglobulin light chain, wherein in (a) or in (b), the polypeptide may also comprise a sialidase. In some embodiments, a host cell is co-transfected with more than one expression vector (e.g., one expression vector expressing a polypeptide comprising an entire, or part of, a heavy chain or heavy chain variable region, optionally comprising a sialidase fused thereto, and another expression vector expressing a polypeptide comprising an entire, or part of, a light chain or light chain variable region, optionally comprising a sialidase fused thereto).

[0145] A polypeptide comprising a sialidase or a fusion protein, e.g., a fusion protein comprising an immunoglobulin heavy chain variable region or light chain variable region, can be produced by growing (culturing) a host cell transfected with an expression vector encoding such a variable region, under conditions that permit expression of the polypeptide. Following expression, the polypeptide can be harvested and purified or isolated using techniques known in the art, e.g., affinity tags such as glutathione-S-transferase (GST) or histidine tags.

[0146] In embodiments in which a fusion protein and/or antibody conjugate is produced, a sialidase fused to a monoclonal antibody, Fc domain, or an antigen-binding domain of the antibody, can be produced by growing (culturing) a host cell transfected with: (a) an expression vector that encodes a complete or partial immunoglobulin heavy chain, and a separate expression vector that encodes a complete or partial immunoglobulin light chain; or (b) a single expression vector that encodes both chains (e.g., complete or partial heavy and light chains), under conditions that permit expression of both chains. The sialidase will be fused to one or more of the chains. The intact fusion protein and/or antibody conjugate can be harvested and purified or isolated using techniques known in the art, e.g., Protein A, Protein G, affinity tags such as glutathione-S-transferase (GST) or histidine tags. It is within ordinary skill in the art to express the heavy chain and the light chain from a single expression vector or from two separate expression vectors.

[0147] In certain embodiments, in order to express a protein, e.g., a sialidase, as a secreted protein, a native N-terminal signal sequence of the protein is replaced, e.g., with MDMRVPAQLLGLLLLWLPGARC (SEQ ID NO: 32). In certain embodiments, to express a protein, e.g., a recombinant human sialidase, as a secreted protein, an N-terminal signal sequence, e.g., MDMRVPAQLLGLLLLWLPGARC (SEQ ID NO: 32), is added. Additional exemplary N-terminal signal sequences include signal sequences from interleukin-2, CD-5, IgG kappa light chain, trypsinogen, serum albumin, and prolactin. In certain embodiments, in order to express a protein, e.g., a sialidase, as a secreted protein, a C terminal lysosomal signal motif, e.g., YGTL (SEQ ID NO: 33) is removed.

[0148] Methods for reducing or eliminating the antigenicity of antibodies and antibody fragments are known in the art. When the antibodies are to be administered to a human, the antibodies preferably are “humanized” to reduce or eliminate antigenicity in humans. Preferably, each humanized antibody has the same or substantially the same affinity for the antigen as the non-humanized mouse antibody from which it was derived.

[0149] In one humanization approach, chimeric proteins are created in which mouse immunoglobulin constant regions are replaced with human immunoglobulin constant regions. See, e.g., Morrison et al., 1984, PROC. NAT. ACAD. SCI. 81:6851-6855, Neuberger et al., 1984, NATURE 312:604-608; U.S. Pat. No. 6,893,625 (Robinson); U.S. Pat. No. 5,500,362 (Robinson); and U.S. Pat. No. 4,816,567 (Cabilly).

[0150] In an approach known as CDR grafting, the CDRs of the light and heavy chain variable regions are grafted into frameworks from another species. For example, murine CDRs can be grafted into human FRs. In some embodiments, the CDRs of the light and heavy chain variable regions of an antibody are grafted into human FRs or consensus human FRs. To create consensus human FRs, FRs from several human heavy chain or light chain amino acid sequences are aligned to identify a consensus amino acid sequence. CDR grafting is described in U.S. Pat. No. 7,022,500 (Queen); U.S. Pat. No. 6,982,321 (Winter); U.S. Pat. No. 6,180,370 (Queen); U.S. Pat. No. 6,054,297 (Carter); U.S. Pat. No. 5,693,762 (Queen); U.S. Pat. No. 5,859,205 (Adair); U.S. Pat. No. 5,693,761 (Queen); U.S. Pat. No. 5,565,332 (Hoogenboom); U.S. Pat. No. 5,585,089 (Queen); U.S. Pat. No. 5,530,101 (Queen); Jones et al. (1986) NATURE 321: 522-525; Riechmann et al. (1988) NATURE 332: 323-327; Verhoeyen et al. (1988) SCIENCE 239: 1534-1536; and Winter (1998) FEBS LETT 430: 92-94.

[0151] In an approach called “SUPERHUMANIZATION™,” human CDR sequences are chosen from human germline genes, based on the structural similarity of the human CDRs to those of the mouse antibody to be humanized. See, e.g., U.S. Pat. No. 6,881,557 (Foote); and Tan et al., 2002, J. IMMUNOL. 169:1119-1125.

[0152] Other methods to reduce immunogenicity include “reshaping,” “hyperchimerization,” and “veneering/resurfacing.” See, e.g., Vaswami et al., 1998, ANNALS OF ALLERGY, ASTHMA, & IMMUNOL. 81:105; Roguska et al., 1996, PROT. ENGINEER 9:895-904; and U.S. Pat. No. 6,072,035 (Hardman). In the veneering/resurfacing approach, the surface accessible amino acid residues in the murine antibody are replaced by amino acid residues more frequently found at the same positions in a human antibody. This type of antibody resurfacing is described, e.g., in U.S. Pat. No. 5,639,641 (Pedersen).

[0153] Another approach for converting a mouse antibody into a form suitable for medical use in humans is known as ACTIVMAB™ technology (Vaccinex, Inc., Rochester, NY), which involves a vaccinia virus-based vector to express antibodies in mammalian cells. High levels of combinatorial diversity of IgG heavy and light chains can be produced. See, e.g., U.S. Pat. No. 6,706,477 (Zauderer); U.S. Pat. No. 6,800,442 (Zauderer); and U.S. Pat. No. 6,872,518 (Zauderer). Another approach for converting a mouse antibody into a form suitable for use in humans is technology practiced commercially by KaloBios Pharmaceuticals, Inc. (Palo Alto, CA). This technology involves the use of a proprietary human “acceptor” library to produce an “epitope focused” library for antibody selection. Another approach for modifying a mouse antibody into a form suitable for medical use in humans is HUMAN ENGINEERING™ technology, which is practiced commercially by XOMA (US) LLC. See, e.g., International (PCT) Publication No. WO 93/11794 and U.S. Pat. No. 5,766,886 (Studnicka); U.S. Pat. No. 5,770,196 (Studnicka); U.S. Pat. No. 5,821,123 (Studnicka); and U.S. Pat. No. 5,869,619 (Studnicka).

[0154] Any suitable approach, including any of the above approaches, can be used to reduce or eliminate human immunogenicity of an antibody.

[0155] In addition, it is possible to create fully human antibodies in mice. Fully human mAbs lacking any non-human sequences can be prepared from human immunoglobulin transgenic mice by techniques referenced in, e.g., Lonberg et al., NATURE 368:856-859, 1994; Fishwild et al., NATURE BIOTECHNOLOGY 14:845-851, 1996; and Mendez et al., NATURE GENETICS 15:146-156, 1997. Fully human monoclonal antibodies can also be prepared and optimized from phage display libraries by techniques referenced in, e.g., Knappik et al., J. MOL. BIOL. 296:57-86, 2000; and Krebs et al., J. IMMUNOL. METH. 254:67-84 2001).

[0156] The present invention encompasses fusion proteins comprising antibody fragments, which may be generated by traditional means, such as enzymatic digestion, or by recombinant techniques. For a review of certain antibody fragments, see Hudson et al. (2003) NAT. MED. 9:129-134.

[0157] Various techniques have been developed for the production of antibody fragments. Traditionally, these fragments were derived via proteolytic digestion of intact antibodies (see, e.g., Morimoto et al. (1992) Journal of Biochemical and Biophysical Methods 24:107-117; and Brennan et al. (1985) Science 229:81). However, these fragments can now be produced directly by recombinant host cells. Fab, Fv and ScFv antibody fragments can all be expressed in and secreted from E. coli, thus allowing the facile production of large amounts of these fragments. Antibody fragments can be isolated from the antibody phage libraries. Alternatively, Fab′-SH fragments can be directly recovered from E. coli and chemically coupled to form F(ab′)2 fragments (Carter et al. (1992) Bio/Technology 10:163-167). According to another approach, F(ab′)2 fragments can be isolated directly from recombinant host cell culture. Fab and F(ab′)2 fragments with increased in vivo half-life comprising salvage receptor binding epitope residues are described in U.S. Pat. No. 5,869,046. Other techniques for the production of antibody fragments will be apparent to the skilled practitioner. In certain embodiments, an antibody is a single chain Fv fragment (scFv). See U.S. Pat. Nos. 5,571,894 and 5,587,458.

[0158] Methods for making bispecific antibodies are known in the art. See Milstein and Cuello (1983) NATURE 305:537, International (PCT) Publication No. WO93/08829, and Traunecker et al. (1991) EMBO J., 10:3655. For further details of generating bispecific antibodies see, for example, Suresh et al. (1986) METHODS ENZYMOL. 121:210. Bispecific antibodies include cross-linked or “heteroconjugate” or “heterodimer” antibodies. For example, one of the antibodies in the heterodimer can be coupled to avidin, the other to biotin. Heterodimer antibodies may be made using any convenient cross-linking method. Suitable cross-linking agents are well known in the art, and are disclosed in U.S. Pat. No. 4,676,980, along with a number of cross-linking techniques.

[0159] Examples of heterodimeric or asymmetric IgG-like molecules include but are not limited to those obtained with the following technologies or using the following formats: Triomab/Quadroma, Knobs-into-Holes, CrossMabs, electrostatically-matched antibodies, LUZ-Y, Strand Exchange Engineered Domain body, Biclonic and DuoBody.

[0160] Advantages of using antibody fragments (e.g., F(ab) and F(ab′)2 fragments) include the elimination of non-specific binding between Fc portions of antibodies and Fc receptors on cells (such as macrophages, dendritic cells, neutrophils, NK cells and B cells). In addition, they may be able to penetrate tissues more efficiently due to their smaller size.

[0161] Heterodimeric antibodies, or asymmetric antibodies, allow for greater flexibility and new formats for attaching a variety of drugs to the antibody arms. One of the general formats for creating a heterodimeric antibody is the “knobs-into-holes” format. This format is specific to the heavy chain part of the constant region in antibodies. The “knobs” part is engineered by replacing a small amino acid with a larger one, which fits into a “hole”, which is engineered by replacing a large amino acid with a smaller one. What connects the “knobs” to the “holes” are the disulfide bonds between each chain. The “knobs-into-holes” shape facilitates antibody dependent cell mediated cytotoxicity. Single chain variable fragments (scFv) are connected to the variable domain of the heavy and light chain via a short linker peptide. The linker is rich in glycine, which gives it more flexibility, and serine/threonine, which gives it specificity. Two different scFv fragments can be connected together, via a hinge region, to the constant domain of the heavy chain or the constant domain of the light chain. This gives the antibody bispecificity, allowing for the binding specificities of two different antigens. The “knobs-into-holes” format enhances heterodimer formation but doesn't suppress homodimer formation.

[0162] Several approaches to support heterodimerization have been described, for example in International (PCT) Publication Nos. WO96/27011, WO98/050431, WO2007/110205, WO2007/147901, WO2009/089004, WO2010/129304, WO2011/90754, WO2011/143545, WO2012/058768, WO2013/157954, and WO2013/096291, and European Patent Publication No. EP1870459. Typically, in the approaches known in the art, the CH3 domain of the first heavy chain and the CH3 domain of the second heavy chain are both engineered in a complementary manner so that the heavy chain comprising one engineered CH3 domain can no longer homodimerize with another heavy chain of the same structure (e.g. a CH3-engineered first heavy chain can no longer homodimerize with another CH3-engineered first heavy chain; and a CH3-engineered second heavy chain can no longer homodimerize with another CH3-engineered second heavy chain). Thereby the heavy chain comprising one engineered CH3 domain is forced to heterodimerize with another heavy chain comprising the CH3 domain, which is engineered in a complementary manner. As a result, the CH3 domain of the first heavy chain and the CH3 domain of the second heavy chain are engineered in a complementary manner by amino acid substitutions, such that the first heavy chain and the second heavy chain are forced to heterodimerize, whereas the first heavy chain and the second heavy chain can no longer homodimerize (e.g., for steric reasons).

### III. Expression Methods

[0163] A protein of interest, e.g., a chimeric antigen receptor and/or a sialidase, may be expressed in a cell of interest by incorporating a gene encoding the protein of interest into an appropriate expression vector. As used herein, “expression vector” refers to a vector comprising a recombinant polynucleotide comprising expression control sequences operatively linked to a nucleotide sequence to be expressed. An expression vector comprises sufficient cis-acting elements for expression; other elements for expression can be supplied by the host cell or in an in vitro expression system. Expression vectors include all those known in the art, such as cosmids, plasmids (e.g., naked or contained in liposomes), retrotransposons (e.g. piggyback, sleeping beauty), and viruses (e.g., lentiviruses, retroviruses, adenoviruses, and adeno-associated viruses) that incorporate the recombinant polynucleotide of interest.

[0164] In certain embodiments, the expression vector is a viral vector. The term “virus” is used herein to refer to an obligate intracellular parasite having no protein-synthesizing or energy-generating mechanism. Exemplary viral vectors include retroviral vectors (e.g., lentiviral vectors), adenoviral vectors, adeno-associated viral vectors, herpesviruses vectors, epstein-barr virus (EBV) vectors, polyomavirus vectors (e.g. simian vacuolating virus 40 (SV10) vectors), poxvirus vectors, and pseudotype virus vectors.

[0165] The virus may be a RNA virus (having a genome that is composed of RNA) or a DNA virus (having a genome composed of DNA). In certain embodiments, the viral vector is a DNA virus vector. Exemplary DNA viruses include parvoviruses (e.g., adeno-associated viruses), adenoviruses, asfarviruses, herpesviruses (e.g., herpes simplex virus 1 and 2 (HSV-1 and HSV-2), epstein-barr virus (EBV), cytomegalovirus (CMV)), papillomoviruses (e.g., HPV), polyomaviruses (e.g., simian vacuolating virus 40 (SV40)), and poxviruses (e.g., vaccinia virus, cowpox virus, smallpox virus, fowlpox virus, sheeppox virus, myxoma virus). In certain embodiments, the viral vector is a RNA virus vector. Exemplary RNA viruses include bunyaviruses (e.g., hantavirus), coronaviruses, flaviviruses (e.g., yellow fever virus, west nile virus, dengue virus), hepatitis viruses (e.g., hepatitis A virus, hepatitis C virus, hepatitis E virus), influenza viruses (e.g., influenza virus type A, influenza virus type B, influenza virus type C), measles virus, mumps virus, noroviruses (e.g., Norwalk virus), poliovirus, respiratory syncytial virus (RSV), retroviruses (e.g., human immunodeficiency virus-1 (HIV-1)) and toroviruses.

[0166] In certain embodiments, the expression vector comprises a regulatory sequence or promoter operably linked to the nucleotide sequence encoding the protein of interest, e.g., a chimeric antigen receptor and/or a sialidase. The term “operably linked” refers to a linkage of polynucleotide elements in a functional relationship. A nucleic acid sequence is “operably linked” when it is placed into a functional relationship with another nucleic acid sequence. For instance, a promoter or enhancer is operably linked to a gene if it affects the transcription of the gene. Operably linked nucleotide sequences are typically contiguous. However, as enhancers generally function when separated from the promoter by several kilobases and intronic sequences may be of variable lengths, some polynucleotide elements may be operably linked but not directly flanked and may even function in trans from a different allele or chromosome.

[0167] Exemplary promoters which may be employed include, but are not limited to, the retroviral LTR, the SV40 promoter, the human cytomegalovirus (CMV) promoter, the U6 promoter, or any other promoter (e.g., cellular promoters such as eukaryotic cellular promoters including, but not limited to, the histone, pol III, and β-actin promoters). Other viral promoters which may be employed include, but are not limited to, adenovirus promoters, TK promoters, and B19 parvovirus promoters.

[0168] In certain embodiments, a promoter is an inducible promoter. The use of an inducible promoter allows for expression of an operatively linked polynucleotide sequence to be turned on or off when desired. In certain embodiments, the promoter is induced in the presence of an exogenous molecule or activity, e.g., a metallothionine promoter, a glucocorticoid promoter, a progesterone promoter, and a tetracycline promoter. In certain embodiments, the promoter is induced in the tumor microenvironment, e.g., an IL-2 promoter, a NFAT promoter, a cell surface protein promoter (e.g., a CD69 promoter or a PD-1 promoter), a cytokine promoter (e.g., a TNF promoter), a cellular activation promoter (e.g., a CTLA4, OX40, or CD40L promoter), or a cell surface adhesion protein promoter (e.g., a VLA-1 promoter).

[0169] In certain embodiments, a promoter mediates rapid, sustained expression, measured in days (e.g., a CD69 promoter). In certain embodiments, a promoter mediates delayed, late-inducible expression (e.g., a VLA1 promoter). In certain embodiments, a promoter mediates rapid, transient expression (e.g., a TNF promoter, an immediate early response gene promoter and others).

[0170] The selection of a promoter, e.g., strong, weak, inducible, tissue-specific, developmental-specific, having specific kinetics of activation (e.g., early and/or late activation), and/or having specific kinetics of expression of an induced gene (e.g., short or long expression) is within the ordinary skill of the artisan and will be apparent to those skilled in the art from the teachings contained herein.

[0171] Examples of other systems for expressing or regulating expression include “ON-Switch” CARs (Wu et al. (2015) SCIENCE 350: aab4077), combinatorial activation systems (Fedorov et al. (2014) CANCER JOURNAL 20:160-165; Kloss et al. (2013) NATURE BIOTECHNOLOGY 31: 71-75), doxycycline-inducible CARs (Sakemura et al. (2016) CANCER IMMUNOL. RES. 4:658-668), antibody-inducible CARs (Hill et al. (2018) NATURE CHEMICAL BIOLOGY 14:112-117), kill switches (Di Stasi et al. (2011) N. ENGL. J. MED. 365:1673-1683 (2011); Budde et al. (2013) PLOS ONE 8: e82742), pause switches (Wei et al. (2012) NATURE 488: 384-388), tunable receptor systems (Ma et al. (2016) PROC. NATL. ACAD. SCI. USA 113: E450-458; Rodgers et al. (2016) PROC. NATL. ACAD. SCI. USA 113: E459-468; Kudo et al. (2014) CANCER RES. 74: 93-103), and proliferation switches (Chen et al. (2010) PROC. NATL. ACAD. SCI. USA 107, 8531-8536).

### Lentivirus Vectors

[0172] In certain embodiments, the viral vector can be a retroviral vector. Examples of retroviral vectors include moloney murine leukemia virus vectors, spleen necrosis virus vectors, and vectors derived from retroviruses such as rous sarcoma virus, harvey sarcoma virus, avian leukosis virus, human immunodeficiency virus, myeloproliferative sarcoma virus, and mammary tumor virus. Retroviral vectors are useful as agents to mediate retroviral-mediated gene transfer into eukaryotic cells.

[0173] In certain embodiments, the retroviral vector is a lentiviral vector. Exemplary lentiviral vectors include vectors derived from human immunodeficiency virus-1 (HIV-1), human immunodeficiency virus-2 (HIV-2), simian immunodeficiency virus (SIV), feline immunodeficiency virus (FIV), bovine immunodeficiency virus (BIV), Jembrana Disease Virus (JDV), equine infectious anemia virus (EIAV), and caprine arthritis encephalitis virus (CAEV).

[0174] Retroviral vectors typically are constructed such that the majority of sequences coding for the structural genes of the virus are deleted and replaced by the gene(s) of interest. Often, the structural genes (i.e., gag, pol, and env), are removed from the retroviral backbone using genetic engineering techniques known in the art. Accordingly, a minimum retroviral vector comprises from 5′ to 3′: a 5′ long terminal repeat (LTR), a packaging signal, an optional exogenous promoter and/or enhancer, an exogenous gene of interest, and a 3′ LTR. If no exogenous promoter is provided, gene expression is driven by the 5′ LTR, which is a weak promoter and requires the presence of Tat to activate expression. The structural genes can be provided in separate vectors for manufacture of the lentivirus, rendering the produced virions replication-defective. Specifically, with respect to lentivirus, the packaging system may comprise a single packaging vector encoding the Gag, Pol, Rev, and Tat genes, and a third, separate vector encoding the envelope protein Env (usually VSV-G due to its wide infectivity). To improve the safety of the packaging system, the packaging vector can be split, expressing Rev from one vector, Gag and Pol from another vector. Tat can also be eliminated from the packaging system by using a retroviral vector comprising a chimeric 5′ LTR, wherein the U3 region of the 5′ LTR is replaced with a heterologous regulatory element.

[0175] The genes can be incorporated into the proviral backbone in several general ways. The most straightforward constructions are ones in which the structural genes of the retrovirus are replaced by a single gene that is transcribed under the control of the viral regulatory sequences within the LTR. Retroviral vectors have also been constructed which can introduce more than one gene into target cells. Usually, in such vectors one gene is under the regulatory control of the viral LTR, while the second gene is expressed either off a spliced message or is under the regulation of its own, internal promoter.

[0176] Accordingly, the new gene(s) are flanked by 5′ and 3′ LTRs, which serve to promote transcription and polyadenylation of the virion RNAs, respectively. The term “long terminal repeat” or “LTR” refers to domains of base pairs located at the ends of retroviral DNAs which, in their natural sequence context, are direct repeats and contain U3, R and U5 regions. LTRs generally provide functions fundamental to the expression of retroviral genes (e.g., promotion, initiation and polyadenylation of gene transcripts) and to viral replication. The LTR contains numerous regulatory signals including transcriptional control elements, polyadenylation signals, and sequences needed for replication and integration of the viral genome. The U3 region contains the enhancer and promoter elements. The U5 region is the sequence between the primer binding site and the R region and contains the polyadenylation sequence. The R (repeat) region is flanked by the U3 and U5 regions. In certain embodiments, the R region comprises a trans-activation response (TAR) genetic element, which interacts with the trans-activator (tat) genetic element to enhance viral replication. This element is not required in embodiments wherein the U3 region of the 5′ LTR is replaced by a heterologous promoter.

[0177] In certain embodiments, the retroviral vector comprises a modified 5′ LTR and/or 3′ LTR. Modifications of the 3′ LTR are often made to improve the safety of lentiviral or retroviral systems by rendering viruses replication-defective. In specific embodiments, the retroviral vector is a self-inactivating (SIN) vector. As used herein, a SIN retroviral vector refers to a replication-defective retroviral vector in which the 3′ LTR U3 region has been modified (e.g., by deletion or substitution) to prevent viral transcription beyond the first round of viral replication. This is because the 3′ LTR U3 region is used as a template for the 5′ LTR U3 region during viral replication and, thus, the viral transcript cannot be made without the U3 enhancer-promoter. In a further embodiment, the 3′ LTR is modified such that the U5 region is replaced, for example, with an ideal polyadenylation sequence. It should be noted that modifications to the LTRs such as modifications to the 3′ LTR, the 5′ LTR, or both 3′ and 5′ LTRs, are also included in the invention.

[0178] In certain embodiments, the U3 region of the 5′ LTR is replaced with a heterologous promoter to drive transcription of the viral genome during production of viral particles. Examples of heterologous promoters which can be used include, for example, viral simian virus 40 (SV40) (e.g., early or late), cytomegalovirus (CMV) (e.g., immediate early), Moloney murine leukemia virus (MoMLV), Rous sarcoma virus (RSV), and herpes simplex virus (HSV) (thymidine kinase) promoters. Typical promoters are able to drive high levels of transcription in a Tat-independent manner. This replacement reduces the possibility of recombination to generate replication-competent virus, because there is no complete U3 sequence in the virus production system.

[0179] Adjacent the 5′ LTR are sequences necessary for reverse transcription of the genome and for efficient packaging of viral RNA into particles (the Psi site). As used herein, the term “packaging signal” or “packaging sequence” refers to sequences located within the retroviral genome which are required for encapsidation of retroviral RNA strands during viral particle formation (see e.g., Clever et al., 1995 J. VIROLOGY, 69(4):2101-09). The packaging signal may be a minimal packaging signal (also referred to as the psi [Ψ] sequence) needed for encapsidation of the viral genome.

[0180] In certain embodiments, the retroviral vector (e.g., lentiviral vector) further comprises a FLAP. As used herein, the term “FLAP” refers to a nucleic acid whose sequence includes the central polypurine tract and central termination sequences (cPPT and CTS) of a retrovirus, e.g., HIV-1 or HIV-2. Suitable FLAP elements are described in U.S. Pat. No. 6,682,907 and in Zennou et al. (2000) CELL, 101:173. During reverse transcription, central initiation of the plus-strand DNA at the cPPT and central termination at the CTS lead to the formation of a three-stranded DNA structure: a central DNA flap. While not wishing to be bound by any theory, the DNA flap may act as a cis-active determinant of lentiviral genome nuclear import and/or may increase the titer of the virus. In particular embodiments, the retroviral vector backbones comprise one or more FLAP elements upstream or downstream of the heterologous genes of interest in the vectors. For example, in particular embodiments, a transfer plasmid includes a FLAP element. In one embodiment, a vector of the invention comprises a FLAP element isolated from HIV-1.

[0181] In certain embodiments, the retroviral vector (e.g., lentiviral vector) further comprises an export element. In one embodiment, retroviral vectors comprise one or more export elements. The term “export element” refers to a cis-acting post-transcriptional regulatory element which regulates the transport of an RNA transcript from the nucleus to the cytoplasm of a cell. Examples of RNA export elements include, but are not limited to, the human immunodeficiency virus (HIV) RRE (see e.g., Cullen et al., (1991) J. VIROL. 65: 1053; and Cullen et al., (1991) CELL 58: 423) and the hepatitis B virus post-transcriptional regulatory element (HPRE). Generally, the RNA export element is placed within the 3′ UTR of a gene, and can be inserted as one or multiple copies.

[0182] In certain embodiments, the retroviral vector (e.g., lentiviral vector) further comprises a posttranscriptional regulatory element. A variety of posttranscriptional regulatory elements can increase expression of a heterologous nucleic acid, e.g., woodchuck hepatitis virus posttranscriptional regulatory element (WPRE; see Zufferey et al., (1999) J. VIROL., 73:2886); the posttranscriptional regulatory element present in hepatitis B virus (HPRE) (Huang et al., MOL. CELL. BIOL., 5:3864); and the like (Liu et al., (1995), GENES DEV., 9:1766). The posttranscriptional regulatory element is generally positioned at the 3′ end the heterologous nucleic acid sequence. This configuration results in synthesis of an mRNA transcript whose 5′ portion comprises the heterologous nucleic acid coding sequences and whose 3′ portion comprises the posttranscriptional regulatory element sequence. In certain embodiments, vectors of the invention lack or do not comprise a posttranscriptional regulatory element such as a WPRE or HPRE, because in some instances these elements increase the risk of cellular transformation and/or do not substantially or significantly increase the amount of mRNA transcript or increase mRNA stability. Therefore, in certain embodiments, vectors of the invention lack or do not comprise a WPRE or HPRE as an added safety measure.

[0183] Elements directing the efficient termination and polyadenylation of the heterologous nucleic acid transcripts increase heterologous gene expression. Transcription termination signals are generally found downstream of the polyadenylation signal. Accordingly, in certain embodiments, the retroviral vector (e.g., lentiviral vector) further comprises a polyadenylation signal. The term “polyadenylation signal” or “polyadenylation sequence” as used herein denotes a DNA sequence which directs both the termination and polyadenylation of the nascent RNA transcript by RNA polymerase H. Efficient polyadenylation of the recombinant transcript is desirable as transcripts lacking a polyadenylation signal are unstable and are rapidly degraded. Illustrative examples of polyadenylation signals that can be used in a vector of the invention, includes an ideal polyadenylation sequence (e.g., AATAAA, ATTAAA AGTAAA (SEQ ID NO: 161)), a bovine growth hormone polyadenylation sequence (BGHpA), a rabbit β-globin polyadenylation sequence (rpgpA), or another suitable heterologous or endogenous polyadenylation sequence known in the art.

[0184] In certain embodiments, a retroviral vector further comprises an insulator element. Insulator elements may contribute to protecting retrovirus-expressed sequences, e.g., therapeutic genes, from integration site effects, which may be mediated by cis-acting elements present in genomic DNA and lead to deregulated expression of transferred sequences (i.e., position effect; see, e.g., Burgess-Beusse et al., (2002) PROC. NATL. ACAD. SCI., USA, 99:16433; and Zhan et al., 2001, HUM. GENET., 109:471). In certain embodiments, the retroviral vector comprises an insulator element in one or both LTRs or elsewhere in the region of the vector that integrates into the cellular genome. Suitable insulators for use in the invention include, but are not limited to, the chicken β-globin insulator (see Chung et al., (1993). CELL 74:505; Chung et al., (1997) PROC. NATL. ACAD. SCI., USA 94:575; and Bell et al., 1999. CELL 98:387). Examples of insulator elements include, but are not limited to, an insulator from a β-globin locus, such as chicken HS4.

[0185] Non-limiting examples of lentiviral vectors include pLVX-EF1alpha-AcGFP1-C1 (Clontech Catalog #631984), pLVX-EF1alpha-IRES-mCherry (Clontech Catalog #631987), pLVX-Puro (Clontech Catalog #632159), pLVX-IRES-Puro (Clontech Catalog #632186), pLenti6/V5-DEST™ (Thermo Fisher), pLenti6.2/V5-DEST™ (Thermo Fisher), pLKO.1 (Plasmid #10878 at Addgene), pLKO.3G (Plasmid #14748 at Addgene), pSico (Plasmid #11578 at Addgene), pLJM1-EGFP (Plasmid #19319 at Addgene), FUGW (Plasmid #14883 at Addgene), pLVTHM (Plasmid #12247 at Addgene), pLVUT-tTR-KRAB (Plasmid #11651 at Addgene), pLL3.7 (Plasmid #11795 at Addgene), pLB (Plasmid #11619 at Addgene), pWPXL (Plasmid #12257 at Addgene), pWPI (Plasmid #12254 at Addgene), EF.CMV.RFP (Plasmid #17619 at Addgene), pLenti CMV Puro DEST (Plasmid #17452 at Addgene), pLenti-puro (Plasmid #39481 at Addgene), pULTRA (Plasmid #24129 at Addgene), pLX301 (Plasmid #25895 at Addgene), pHIV-EGFP (Plasmid #21373 at Addgene), pLV-mCherry (Plasmid #36084 at Addgene), pLionII (Plasmid #1730 at Addgene), pInducer10-mir-RUP-PheS (Plasmid #44011 at Addgene). These vectors can be modified to be suitable for therapeutic use. For example, a selection marker (e.g., puro, EGFP, or mCherry) can be deleted or replaced with a second exogenous gene of interest. Further examples of lentiviral vectors are disclosed in U.S. Pat. Nos. 7,629,153, 7,198,950, 8,329,462, 6,863,884, 6,682,907, 7,745,179, 7,250,299, 5,994,136, 6,287,814, 6,013,516, 6,797,512, 6,544,771, 5,834,256, 6,958,226, 6,207,455, 6,531,123, and 6,352,694, and PCT Publication No. WO2017/091786.

### Adeno-Associated Virus (AAV) Vectors

[0186] In certain embodiments, an expression vector is an adeno-associated virus (AAV) vector. AAV is a small, nonenveloped icosahedral virus of the genus Dependoparvovirus and family Parvovirus. AAV has a single-stranded linear DNA genome of approximately 4.7 kb. AAV is capable of infecting both dividing and quiescent cells of several tissue types, with different AAV serotypes exhibiting different tissue tropism.

[0187] AAV includes numerous serologically distinguishable types including serotypes AAV-1 to AAV-12, as well as more than 100 serotypes from nonhuman primates (See, e.g., Srivastava (2008) J. CELL BIOCHEM., 105(1): 17-24, and Gao et al. (2004) J. VIROL., 78(12), 6381-6388). The serotype of the AAV vector used in the present invention can be selected by a skilled person in the art based on the efficiency of delivery, tissue tropism, and immunogenicity. For example, AAV-1, AAV-2, AAV-4, AAV-5, AAV-8, and AAV-9 can be used for delivery to the central nervous system; AAV-1, AAV-8, and AAV-9 can be used for delivery to the heart; AAV-2 can be used for delivery to the kidney; AAV-7, AAV-8, and AAV-9 can be used for delivery to the liver; AAV-4, AAV-5, AAV-6, AAV-9 can be used for delivery to the lung, AAV-8 can be used for delivery to the pancreas, AAV-2, AAV-5, and AAV-8 can be used for delivery to the photoreceptor cells; AAV-1, AAV-2, AAV-4, AAV-5, and AAV-8 can be used for delivery to the retinal pigment epithelium; AAV-1, AAV-6, AAV-7, AAV-8, and AAV-9 can be used for delivery to the skeletal muscle. In certain embodiments, the AAV capsid protein comprises a sequence as disclosed in U.S. Pat. No. 7,198,951, such as, but not limited to, AAV-9 (SEQ ID NOs: 1-3 of U.S. Pat. No. 7,198,951), AAV-2 (SEQ ID NO: 4 of U.S. Pat. No. 7,198,951), AAV-1 (SEQ ID NO: 5 of U.S. Pat. No. 7,198,951), AAV-3 (SEQ ID NO: 6 of U.S. Pat. No. 7,198,951), and AAV-8 (SEQ ID NO: 7 of U.S. Pat. No. 7,198,951). AAV serotypes identified from rhesus monkeys, e.g., rh.8, rh.10, rh.39, rh.43, and rh.74, are also contemplated in the instant invention. Besides the natural AAV serotypes, modified AAV capsids have been developed for improving efficiency of delivery, tissue tropism, and immunogenicity. Exemplary natural and modified AAV capsids are disclosed in U.S. Pat. Nos. 7,906,111, 9,493,788, and 7,198,951, and PCT Publication No. WO2017189964A2.

[0188] The wild-type AAV genome contains two 145 nucleotide inverted terminal repeats (ITRs), which contain signal sequences directing AAV replication, genome encapsidation and integration. In addition to the ITRs, three AAV promoters, p5, p19, and p40, drive expression of two open reading frames encoding rep and cap genes. Two rep promoters, coupled with differential splicing of the single AAV intron, result in the production of four rep proteins (Rep 78, Rep 68, Rep 52, and Rep 40) from the rep gene. Rep proteins are responsible for genomic replication. The Cap gene is expressed from the p40 promoter, and encodes three capsid proteins (VP1, VP2, and VP3) which are splice variants of the cap gene. These proteins form the capsid of the AAV particle.

[0189] Because the cis-acting signals for replication, encapsidation, and integration are contained within the ITRs, some or all of the 4.3 kb internal genome may be replaced with foreign DNA, for example, an expression cassette for an exogenous gene of interest. Accordingly, in certain embodiments, the AAV vector comprises a genome comprising an expression cassette for an exogenous gene flanked by a 5′ ITR and a 3′ ITR. The ITRs may be derived from the same serotype as the capsid or a derivative thereof. Alternatively, the ITRs may be of a different serotype from the capsid, thereby generating a pseudotyped AAV. In certain embodiments, the ITRs are derived from AAV-2. In certain embodiments, the ITRs are derived from AAV-5. At least one of the ITRs may be modified to mutate or delete the terminal resolution site, thereby allowing production of a self-complementary AAV vector.

[0190] The rep and cap proteins can be provided in trans, for example, on a plasmid, to produce an AAV vector. A host cell line permissive of AAV replication must express the rep and cap genes, the ITR-flanked expression cassette, and helper functions provided by a helper virus, for example adenoviral genes Ela, E1b55K, E2a, E4orf6, and VA (Weitzman et al., Adeno-associated virus biology. Adeno-Associated Virus: Methods and Protocols, pp. 1-23, 2011). Methods for generating and purifying AAV vectors have been described in detail (See e.g., Mueller et al., (2012) CURRENT PROTOCOLS IN MICROBIOLOGY, 14D.1.1-14D.1.21, Production and Discovery of Novel Recombinant Adeno-Associated Viral Vectors). Numerous cell types are suitable for producing AAV vectors, including HEK293 cells, COS cells, HeLa cells, BHK cells, Vero cells, as well as insect cells (See e.g. U.S. Pat. Nos. 6,156,303, 5,387,484, 5,741,683, 5,691,176, 5,688,676, and 8,163,543, U.S. Patent Publication No. 20020081721, and PCT Publication Nos. WO00/47757, WO00/24916, and WO96/17947). AAV vectors are typically produced in these cell types by one plasmid containing the ITR-flanked expression cassette, and one or more additional plasmids providing the additional AAV and helper virus genes.

[0191] AAV of any serotype may be used in the present invention. Similarly, it is contemplated that any adenoviral type may be used, and a person of skill in the art will be able to identify AAV and adenoviral types suitable for the production of their desired recombinant AAV vector (rAAV). AAV particles may be purified, for example by affinity chromatography, iodixonal gradient, or CsCl gradient.

[0192] AAV vectors may have single-stranded genomes that are 4.7 kb in size, or are larger or smaller than 4.7 kb, including oversized genomes that are as large as 5.2 kb, or as small as 3.0 kb. Thus, where the exogenous gene of interest to be expressed from the AAV vector is small, the AAV genome may comprise a stuffer sequence. Further, vector genomes may be substantially self-complementary thereby allowing for rapid expression in the cell. In certain embodiments, the genome of a self-complementary AAV vector comprises from 5′ to 3′: a 5′ ITR; a first nucleic acid sequence comprising a promoter and/or enhancer operably linked to a coding sequence of a gene of interest; a modified ITR that does not have a functional terminal resolution site; a second nucleic acid sequence complementary or substantially complementary to the first nucleic acid sequence; and a 3′ ITR. AAV vectors containing genomes of all types are suitable for use in the method of the present invention.

[0193] Non-limiting examples of AAV vectors include pAAV-MCS (Agilent Technologies), pAAVK-EF1α-MCS (System Bio Catalog #AAV502A-1), pAAVK-EF1α-MCS1-CMV-MCS2 (System Bio Catalog #AAV503A-1), pAAV-ZsGreen1 (Clontech Catalog #6231), pAAV-MCS2 (Addgene Plasmid #46954), AAV-Stuffer (Addgene Plasmid #106248), pAAVscCBPIGpluc (Addgene Plasmid #35645), AAVS1_Puro_PGK1_3×FLAG_Twin_Strep (Addgene Plasmid #68375), pAAV-RAM-d2TTA::TRE-MCS-WPRE-pA (Addgene Plasmid #63931), pAAV-UbC (Addgene Plasmid #62806), pAAVS1-P-MCS (Addgene Plasmid #80488), pAAV-Gateway (Addgene Plasmid #32671), pAAV-Puro_siKD (Addgene Plasmid #86695), pAAVS1-Nst-MCS (Addgene Plasmid #80487), pAAVS1-Nst-CAG-DEST (Addgene Plasmid #80489), pAAVS1-P-CAG-DEST (Addgene Plasmid #80490), pAAVf-EnhCB-lacZnls (Addgene Plasmid #35642), and pAAVS1-shRNA (Addgene Plasmid #82697). These vectors can be modified to be suitable for therapeutic use. For example, an exogenous gene of interest can be inserted in a multiple cloning site, and a selection marker (e.g., puro or a gene encoding a fluorescent protein) can be deleted or replaced with another (same or different) exogenous gene of interest. Further examples of AAV vectors are disclosed in U.S. Pat. Nos. 5,871,982, 6,270,996, 7,238,526, 6,943,019, 6,953,690, 9,150,882, and 8,298,818, U.S. Patent Publication No. 2009/0087413, and PCT Publication Nos. WO2017075335A1, WO2017075338A2, and WO2017201258A1.

### Adenoviral Vectors

[0194] In certain embodiments, the viral vector can be an adenoviral vector. Adenoviruses are medium-sized (90-100 nm), non-enveloped (naked), icosahedral viruses composed of a nucleocapsid and a double-stranded linear DNA genome. The term “adenovirus” refers to any virus in the genus Adenoviridiae including, but not limited to, human, bovine, ovine, equine, canine, porcine, murine, and simian adenovirus subgenera. Typically, an adenoviral vector is generated by introducing one or more mutations (e.g., a deletion, insertion, or substitution) into the adenoviral genome of the adenovirus so as to accommodate the insertion of a non-native nucleic acid sequence, for example, for gene transfer, into the adenovirus.

[0195] A human adenovirus can be used as the source of the adenoviral genome for the adenoviral vector. For instance, an adenovirus can be of subgroup A (e.g., serotypes 12, 18, and 31), subgroup B (e.g., serotypes 3, 7, 11, 14, 16, 21, 34, 35, and 50), subgroup C (e.g., serotypes 1, 2, 5, and 6), subgroup D (e.g., serotypes 8, 9, 10, 13, 15, 17, 19, 20, 22-30, 32, 33, 36-39, and 42-48), subgroup E (e.g., serotype 4), subgroup F (e.g., serotypes 40 and 41), an unclassified serogroup (e.g., serotypes 49 and 51), or any other adenoviral serogroup or serotype. Adenoviral serotypes 1 through 51 are available from the American Type Culture Collection (ATCC, Manassas, Virginia). Non-group C adenoviral vectors, methods of producing non-group C adenoviral vectors, and methods of using non-group C adenoviral vectors are disclosed in, for example, U.S. Pat. Nos. 5,801,030, 5,837,511, and 5,849,561, and PCT Publication Nos. WO1997/012986 and WO1998/053087.

[0196] Non-human adenovirus (e.g., ape, simian, avian, canine, ovine, or bovine adenoviruses) can be used to generate the adenoviral vector (i.e., as a source of the adenoviral genome for the adenoviral vector). For example, the adenoviral vector can be based on a simian adenovirus, including both new world and old world monkeys (see, e.g., Virus Taxonomy: VHIth Report of the International Committee on Taxonomy of Viruses (2005)). A phylogeny analysis of adenoviruses that infect primates is disclosed in, e.g., Roy et al. (2009) PLoS PATHOG. 5(7):e1000503. A gorilla adenovirus can be used as the source of the adenoviral genome for the adenoviral vector. Gorilla adenoviruses and adenoviral vectors are described in, e.g., PCT Publication Nos. WO2013/052799, WO2013/052811, and WO2013/052832. The adenoviral vector can also comprise a combination of subtypes and thereby be a “chimeric” adenoviral vector.

[0197] The adenoviral vector can be replication-competent, conditionally replication-competent, or replication-deficient. A replication-competent adenoviral vector can replicate in typical host cells, i.e., cells typically capable of being infected by an adenovirus. A conditionally-replicating adenoviral vector is an adenoviral vector that has been engineered to replicate under pre-determined conditions. For example, replication-essential gene functions, e.g., gene functions encoded by the adenoviral early regions, can be operably linked to an inducible, repressible, or tissue-specific transcription control sequence, e.g., a promoter. Conditionally-replicating adenoviral vectors are further described in U.S. Pat. No. 5,998,205. A replication-deficient adenoviral vector is an adenoviral vector that requires complementation of one or more gene functions or regions of the adenoviral genome that are required for replication, as a result of, for example, a deficiency in one or more replication-essential gene function or regions, such that the adenoviral vector does not replicate in typical host cells, especially those in a human to be infected by the adenoviral vector.

[0198] Preferably, the adenoviral vector is replication-deficient, such that the replication-deficient adenoviral vector requires complementation of at least one replication-essential gene function of one or more regions of the adenoviral genome for propagation (e.g., to form adenoviral vector particles). The adenoviral vector can be deficient in one or more replication-essential gene functions of only the early regions (i.e., E1-E4 regions) of the adenoviral genome, only the late regions (i.e., L1-L5 regions) of the adenoviral genome, both the early and late regions of the adenoviral genome, or all adenoviral genes (i.e., a high capacity adenovector (HC-Ad)). See, e.g., Morsy et al. (1998) PROC. NATL. ACAD. SCI. USA 95: 965-976, Chen et al. (1997) PROC. NATL. ACAD. SCI. USA 94: 1645-1650, and Kochanek et al. (1999) HUM. GENE THER. 10(15):2451-9. Examples of replication-deficient adenoviral vectors are disclosed in U.S. Pat. Nos. 5,837,511, 5,851,806, 5,994,106, 6,127,175, 6,482,616, and 7,195,896, and PCT Publication Nos. WO1994/028152, WO1995/002697, WO1995/016772, WO1995/034671, WO1996/022378, WO1997/012986, WO1997/021826, and WO2003/022311.

[0199] The replication-deficient adenoviral vector of the invention can be produced in complementing cell lines that provide gene functions not present in the replication-deficient adenoviral vector, but required for viral propagation, at appropriate levels in order to generate high titers of viral vector stock. Such complementing cell lines are known and include, but are not limited to, 293 cells (described in, e.g., Graham et al. (1977) J. GEN. VIROL. 36: 59-72), PER.C6 cells (described in, e.g., PCT Publication No. WO1997/000326, and U.S. Pat. Nos. 5,994,128 and 6,033,908), and 293-ORF6 cells (described in, e.g., PCT Publication No. WO1995/034671 and Brough et al. (1997) J. VIROL. 71: 9206-9213). Other suitable complementing cell lines to produce the replication-deficient adenoviral vector of the invention include complementing cells that have been generated to propagate adenoviral vectors encoding transgenes whose expression inhibits viral growth in host cells (see, e.g., U.S. Patent Publication No. 2008/0233650). Additional suitable complementing cells are described in, for example, U.S. Pat. Nos. 6,677,156 and 6,682,929, and PCT Publication No. WO2003/020879. Formulations for adenoviral vector-containing compositions are further described in, for example, U.S. Pat. Nos. 6,225,289, and 6,514,943, and PCT Publication No. WO2000/034444.

[0200] Additional exemplary adenoviral vectors, and/or methods for making or propagating adenoviral vectors are described in U.S. Pat. Nos. 5,559,099, 5,837,511, 5,846,782, 5,851,806, 5,994,106, 5,994,128, 5,965,541, 5,981,225, 6,040,174, 6,020,191, 6,083,716, 6,113,913, 6,303,362, 7,067,310, and 9,073,980.

[0201] Commercially available adenoviral vector systems include the ViraPower™ Adenoviral Expression System available from Thermo Fisher Scientific, the AdEasy™ adenoviral vector system available from Agilent Technologies, and the Adeno-X™ Expression System 3 available from Takara Bio USA, Inc.

### Viral Vector Production

[0202] Methods for producing viral vectors are known in the art. Typically, a virus of interest is produced in a suitable host cell line using conventional techniques including culturing a transfected or infected host cell under suitable conditions so as to allow the production of infectious viral particles. Nucleic acids encoding viral genes and/or genes of interest can be incorporated into plasmids and introduced into host cells through conventional transfection or transformation techniques. Exemplary suitable host cells for production of disclosed viruses include human cell lines such as HeLa, Hela-S3, HEK293, 911, A549, HER96, or PER-C6 cells. Specific production and purification conditions will vary depending upon the virus and the production system employed.

[0203] In certain embodiments, producer cells may be directly administered to a subject, however, in other embodiments, following production, infectious viral particles are recovered from the culture and optionally purified. Typical purification steps may include plaque purification, centrifugation, e.g., cesium chloride gradient centrifugation, clarification, enzymatic treatment, e.g., benzonase or protease treatment, chromatographic steps, e.g., ion exchange chromatography or filtration steps.

### IV. Pretreated Immune Cells

[0204] An immune cell (for example, an isolated naturally occurring immune cell or an engineered immune cell described herein) may, for example, be pretreated with a sialidase (for example, a sialidase described herein), prior to administration to a subject. It is contemplated that pretreatment of an immune cell with a sialidase may remove sialic acid and/or sialic acid containing molecules from the surface of the immune cell, thereby reducing immune inhibition mediated by the sialic acid and/or sialic acid containing molecules and enhancing a treatment using the immune cell.

[0205] The invention provides a pharmaceutical composition comprising: (a) an isolated immune cell pretreated with a sialidase; and (b) a pharmaceutically acceptable carrier or diluent, as well as a method of treating cancer in a subject in need thereof, where the method comprises administering to the subject an isolated immune cell, for example, a T-cell, pretreated with a sialidase.

[0206] The immune cell may be pretreated with the sialidase for at least 30 minutes, at least 1 hour, at least 2 hours, at least 3 hours, at least 6 hours, at least 12 hours, at least 1 day, at least 2 days, at least 3 days, at least 4 days, at least 5 days, at least 6 days, or at least 1 week prior to administration to a subject.

[0207] Depending upon the circumstances, the immune cell may be used as is (namely, as a cell preparation containing the sialidase) or after purification from the sialidase. If purification is desired, the immune cell may be purified from the sialidase by any method known in the art, including, for example, by harvesting the cells as a cell pellet via centrifugation together with washing, for example, with a buffered solution, or by immunoprecipitation or affinity purification. An exemplary anti-Neu2 antibody suitable for removal of Neu2 by immunoprecipitation or affinity purification is 3B9 available from Novus Biologicals.

[0208] In certain embodiments, the purification results in removal of at least 10%, at least 20%, at least 30%, at least 40%, at least 50%, at least 60%, at least 70%, at least 80%, at least 90%, or 100% of the sialidase activity present prior to purification. In certain embodiments, following purification, a composition comprising the immune cell has no detectable sialidase activity. Sialidase activity may be assayed by any method known in the art, including, for example, by measuring the release of sialic acid from the fluorogenic substrate 4-methylumbelliferyl-N-acetylneuraminic acid (4MU-NeuAc). In certain embodiments, following purification, incubation of the composition with 2000 μM 4MU-NeuAc at pH 7 results in a fluorescent signal (A.U.) of less than 3.0×10⁷, 2.0×10⁷, 1.0×10⁷, 0.5×10⁷, 0.25×10⁷, or 0.1×10⁷.

### V. Pharmaceutical Compositions

[0209] For therapeutic use, an immune cell (for example, an isolated naturally occurring immune cell or an engineered immune cell described herein) and/or a sialidase preferably is combined with a pharmaceutically acceptable carrier. The term “pharmaceutically acceptable” as used herein refers to those compounds, materials, compositions, and/or dosage forms which are, within the scope of sound medical judgment, suitable for use in contact with the tissues of human beings and animals without excessive toxicity, irritation, allergic response, or other problem or complication, commensurate with a reasonable benefit/risk ratio.

[0210] The term “pharmaceutically acceptable carrier” as used herein refers to buffers, carriers, and excipients suitable for use in contact with the tissues of human beings and animals without excessive toxicity, irritation, allergic response, or other problem or complication, commensurate with a reasonable benefit/risk ratio. Pharmaceutically acceptable carriers include any of the standard pharmaceutical carriers, such as a phosphate buffered saline solution, water, emulsions (e.g., such as an oil/water or water/oil emulsions), and various types of wetting agents. The compositions also can include stabilizers and preservatives. For examples of carriers, stabilizers and adjuvants, see, e.g., Martin, Remington's Pharmaceutical Sciences, 15th Ed., Mack Publ. Co., Easton, PA [1975]. Pharmaceutically acceptable carriers include buffers, solvents, dispersion media, coatings, isotonic and absorption delaying agents, and the like, that are compatible with pharmaceutical administration. The use of such media and agents for pharmaceutically active substances is known in the art.

[0211] In certain embodiments, a pharmaceutical composition may contain formulation materials for modifying, maintaining or preserving, for example, the pH, osmolarity, viscosity, clarity, color, isotonicity, odor, sterility, stability, rate of dissolution or release, adsorption or penetration of the composition. In such embodiments, suitable formulation materials include, but are not limited to, amino acids (such as glycine, glutamine, asparagine, arginine or lysine); antimicrobials; antioxidants (such as ascorbic acid, sodium sulfite or sodium hydrogen-sulfite); buffers (such as borate, bicarbonate, Tris-HCl, citrates, phosphates or other organic acids); bulking agents (such as mannitol or glycine); chelating agents (such as ethylenediamine tetraacetic acid (EDTA)); complexing agents (such as caffeine, polyvinylpyrrolidone, beta-cyclodextrin or hydroxypropyl-beta-cyclodextrin); fillers; monosaccharides; disaccharides; and other carbohydrates (such as glucose, mannose or dextrins); proteins (such as serum albumin, gelatin or immunoglobulins); coloring, flavoring and diluting agents; emulsifying agents; hydrophilic polymers (such as polyvinylpyrrolidone); low molecular weight polypeptides; salt-forming counterions (such as sodium); preservatives (such as benzalkonium chloride, benzoic acid, salicylic acid, thimerosal, phenethyl alcohol, methylparaben, propylparaben, chlorhexidine, sorbic acid or hydrogen peroxide); solvents (such as glycerin, propylene glycol or polyethylene glycol); sugar alcohols (such as mannitol or sorbitol); suspending agents; surfactants or wetting agents (such as pluronics, PEG, sorbitan esters, polysorbates such as polysorbate 20, polysorbate, triton, tromethamine, lecithin, cholesterol, tyloxapal); stability enhancing agents (such as sucrose or sorbitol); tonicity enhancing agents (such as alkali metal halides, preferably sodium or potassium chloride, mannitol sorbitol); delivery vehicles; diluents; excipients and/or pharmaceutical adjuvants (See Remington's Pharmaceutical Sciences, 18th ed. (Mack Publishing Company, 1990).

[0212] In certain embodiments, a pharmaceutical composition may contain nanoparticles, e.g., polymeric nanoparticles, liposomes, or micelles (See Anselmo et al. (2016) BIOENG. TRANSL. MED. 1: 10-29).

[0213] In certain embodiments, a pharmaceutical composition may contain a sustained- or controlled-delivery formulation. Techniques for formulating sustained- or controlled-delivery means, such as liposome carriers, bio-erodible microparticles or porous beads and depot injections, are also known to those skilled in the art. Sustained-release preparations may include, e.g., porous polymeric microparticles or semipermeable polymer matrices in the form of shaped articles, e.g., films, or microcapsules. Sustained release matrices may include polyesters, hydrogels, polylactides, copolymers of L-glutamic acid and gamma ethyl-L-glutamate, poly (2-hydroxyethyl-inethacrylate), ethylene vinyl acetate, or poly-D(−)-3-hydroxybutyric acid. Sustained release compositions may also include liposomes that can be prepared by any of several methods known in the art.

[0214] Pharmaceutical compositions containing an immune cell and/or a sialidase disclosed herein can be presented in a dosage unit form and can be prepared by any suitable method. A pharmaceutical composition should be formulated to be compatible with its intended route of administration. Examples of routes of administration are intravenous (IV), intradermal, inhalation, transdermal, topical, transmucosal, intrathecal and rectal administration. In certain embodiments, a pharmaceutical composition containing an immune cell and/or a sialidase disclosed herein is administered by IV infusion. In certain embodiments, a pharmaceutical composition containing an immune cell and/or a sialidase disclosed herein is administered by intratumoral injection.

[0215] Useful formulations can be prepared by methods known in the pharmaceutical art. For example, see Remington's Pharmaceutical Sciences, 18th ed. (Mack Publishing Company, 1990). Formulation components suitable for parenteral administration include a sterile diluent such as water for injection, saline solution, fixed oils, polyethylene glycols, glycerin, propylene glycol or other synthetic solvents; antibacterial agents such as benzyl alcohol or methyl parabens; antioxidants such as ascorbic acid or sodium bisulfite; chelating agents such as EDTA; buffers such as acetates, citrates or phosphates; and agents for the adjustment of tonicity such as sodium chloride or dextrose.

[0216] For intravenous administration, suitable carriers include physiological saline, bacteriostatic water, Cremophor ELTM (BASF, Parsippany, NJ) or phosphate buffered saline (PBS). The carrier should be stable under the conditions of manufacture and storage, and should be preserved against microorganisms. The carrier can be a solvent or dispersion medium containing, for example, water, ethanol, polyol (for example, glycerol, propylene glycol, and liquid polyetheylene glycol), and suitable mixtures thereof.

[0217] Pharmaceutical formulations preferably are sterile. Sterilization can be accomplished by any suitable method, e.g., filtration through sterile filtration membranes. Where the composition is lyophilized, filter sterilization can be conducted prior to or following lyophilization and reconstitution.

[0218] A therapeutically effective amount of isolated, naturally occurring or engineered immune cells, e.g., T-cells, is in the range of, e.g., 10⁵ to 10⁹ cells, 10⁵ to 10⁸ cells, 10⁵ to 10⁷ cells, 10⁵ to 10⁶ cells, 10⁶ to 10⁹ cells, 10⁶ to 10⁸ cells, 10⁶ to 10⁷ cells, 10⁷ to 10⁹ cells, 10⁷ to 10⁸ cells, or 10⁸ to 10⁹ cells per kilogram. The amount administered will depend on variables such as the type and extent of disease or indication to be treated, the overall health of the patient, the in vivo potency of the antibody, the pharmaceutical formulation, and the route of administration. Progress can be monitored by periodic assessment.

[0219] The cell compositions described herein may be administered locally or systemically. Administration will generally be parenteral administration. In a preferred embodiment, the pharmaceutical composition is administered subcutaneously and in an even more preferred embodiment intravenously. Preparations for parenteral administration include sterile aqueous or non-aqueous solutions, suspensions, and emulsions.

[0220] Generally, a therapeutically effective amount of active component, for example, a sialidase, is in the range of 0.1 mg/kg to 100 mg/kg, e.g., 1 mg/kg to 100 mg/kg, 1 mg/kg to 10 mg/kg. The amount administered will depend on variables such as the type and extent of disease or indication to be treated, the overall health of the patient, the in vivo potency of the antibody, the pharmaceutical formulation, and the route of administration. The initial dosage can be increased beyond the upper level in order to rapidly achieve the desired blood-level or tissue-level. Alternatively, the initial dosage can be smaller than the optimum, and the daily dosage may be progressively increased during the course of treatment. Human dosage can be optimized, e.g., in a conventional Phase I dose escalation study designed to run from 0.5 mg/kg to 20 mg/kg. Dosing frequency can vary, depending on factors such as route of administration, dosage amount, serum half-life of the antibody, and the disease being treated. Exemplary dosing frequencies are once per day, once per week and once every two weeks. A preferred route of administration is parenteral, e.g., intravenous infusion. In certain embodiments, a sialidase is lyophilized, and then reconstituted in buffered saline, at the time of administration.

### VI. Therapeutic Uses

[0221] The compositions and methods disclosed herein can be used to treat various forms of cancer in a subject or inhibit cancer growth in a subject. The invention provides a method of treating a cancer in a subject. The method comprises administering to the subject an effective amount of a disclosed immune cell and/or sialidase, either alone or in a combination with another therapeutic agent to treat the cancer in the subject. The term “effective amount” as used herein refers to the amount of an active agent (e.g., an immune cell and/or sialidase of the present invention) sufficient to effect beneficial or desired results. An effective amount can be administered in one or more administrations, applications or dosages and is not intended to be limited to a particular formulation or administration route.

[0222] As used herein, “treat”, “treating” and “treatment” mean the treatment of a disease in a subject, e.g., in a human. This includes: (a) inhibiting the disease, i.e., arresting its development; and (b) relieving the disease, i.e., causing regression of the disease state. As used herein, the terms “subject” and “patient” refer to an organism to be treated by the methods and compositions described herein. Such organisms preferably include, but are not limited to, mammals (e.g., murines, simians, equines, bovines, porcines, canines, felines, and the like), and more preferably includes humans.

[0223] Examples of cancers include solid tumors, soft tissue tumors, hematopoietic tumors and metastatic lesions. Examples of hematopoietic tumors include, leukemia, acute leukemia, acute lymphoblastic leukemia (ALL), B-cell, T-cell or FAB ALL, acute myeloid leukemia (AML), chronic myelocytic leukemia (CMIL), chronic lymphocytic leukemia (CLL), e.g., transformed CLL, diffuse large B-cell lymphomas (DLBCL), follicular lymphoma, hairy cell leukemia, myelodyplastic syndrome (MDS), a lymphoma, Hodgkin's disease, a malignant lymphoma, non-Hodgkin's lymphoma, Burkitt's lymphoma, multiple myeloma, or Richter's Syndrome (Richter's Transformation). Examples of solid tumors include malignancies, e.g., sarcomas, adenocarcinomas, and carcinomas, of the various organ systems, such as those affecting head and neck (including pharynx), thyroid, lung (small cell or non-small cell lung carcinoma (NSCLC)), breast, lymphoid, gastrointestinal (e.g., oral, esophageal, stomach, liver, pancreas, small intestine, colon and rectum, anal canal), genitals and genitourinary tract (e.g., renal, urothelial, bladder, ovarian, uterine, cervical, endometrial, prostate, testicular), CNS (e.g., neural or glial cells, e.g., neuroblastoma or glioma), or skin (e.g., melanoma).

[0224] In certain embodiments the cancer is an epithelial cancer, e.g., an epithelial cancer that upregulates the expression of sialylated glycans. Exemplary epithelial cancers include, but are not limited to, endometrial cancer, colon, ovarian cancer, cervical cancer, vulvar cancer, uterine cancer or fallopian tube cancer, breast cancer, prostate cancer, lung cancer, pancreatic cancer, urinary cancer, bladder cancer, head and neck cancer, oral cancer and liver cancer. Epithelial cancers also include carcinomas, for example, acinar carcinoma, acinous carcinoma, adenocystic carcinoma, adenoid cystic carcinoma, carcinoma adenomatosum, carcinoma of adrenal cortex, alveolar carcinoma, alveolar cell carcinoma, basal cell carcinoma, carcinoma basocellulare, basaloid carcinoma, baso squamous cell carcinoma, bronchioalveolar carcinoma, bronchiolar carcinoma, bronchogenic carcinoma, cerebriform carcinoma, cholangiocellular carcinoma, chorionic carcinoma, colloid carcinoma, comedo carcinoma, corpus carcinoma, cribriform carcinoma, carcinoma en cuirasse, carcinoma cutaneum, cylindrical carcinoma, cylindrical cell carcinoma, duct carcinoma, carcinoma durum, embryonal carcinoma, encephaloid carcinoma, epiermoid carcinoma, carcinoma epitheliale adenoides, exophytic carcinoma, carcinoma ex ulcere, carcinoma fibrosum, gelatiniforni carcinoma, gelatinous carcinoma, giant cell carcinoma, carcinoma gigantocellulare, glandular carcinoma, granulosa cell carcinoma, hair-matrix carcinoma, hematoid carcinoma, hepatocellular carcinoma, Hurthle cell carcinoma, hyaline carcinoma, hypemephroid carcinoma, infantile embryonal carcinoma, carcinoma in situ, intraepidermal carcinoma, intraepithelial carcinoma, Krompecher's carcinoma, Kulchitzky-cell carcinoma, large-cell carcinoma, lenticular carcinoma, carcinoma lenticulare, lipomatous carcinoma, lymphoepithelial carcinoma, carcinoma medullare, medullary carcinoma, melanotic carcinoma, carcinoma molle, mucinous carcinoma, carcinoma muciparum, carcinoma mucocellulare, mucoepidermoid carcinoma, carcinoma mucosum, mucous carcinoma, carcinoma myxomatodes, nasopharyngeal carcinoma, oat cell carcinoma, carcinoma ossificans, osteoid carcinoma, papillary carcinoma, periportal carcinoma, preinvasive carcinoma, prickle cell carcinoma, pultaceous carcinoma, renal cell carcinoma of kidney, reserve cell carcinoma, carcinoma sarcomatodes, schneiderian carcinoma, scirrhous carcinoma, carcinoma scroti, signet-ring cell carcinoma, carcinoma simplex, small-cell carcinoma, solanoid carcinoma, spheroidal cell carcinoma, spindle cell carcinoma, carcinoma spongiosum, squamous carcinoma, squamous cell carcinoma, string carcinoma, carcinoma telangiectaticum, carcinoma telangiectodes, transitional cell carcinoma, carcinoma tuberosum, tuberous carcinoma, verrucous carcinoma, and carcinoma villosum.

[0225] In certain embodiments, the cancer is an adenocarcinoma, a metastatic cancer and/or is a refractory cancer. In certain embodiments, the cancer is a breast, colon or colorectal, lung, ovarian, pancreatic, prostate, cervical, endometrial, head and neck, liver, renal, skin, stomach, testicular, thyroid or urothelial cancer. In certain embodiments, the cancer is an epithelial cancer, e.g., an endometrial cancer, ovarian cancer, cervical cancer, vulvar cancer, uterine cancer, fallopian tube cancer, breast cancer, prostate cancer, lung cancer, pancreatic cancer, urinary cancer, bladder cancer, head and neck cancer, oral cancer or liver cancer.

[0226] In certain embodiments, the cancer is a hematologic cancer, e.g., a leukemia, lymphoma, or multiple myeloma, e.g., Chronic lymphocytic leukemia (CLL), Acute myeloid leukemia (AML), Chronic myelogenous leukemia (CML), Non-Hodgkin lymphoma (NHL), Burkitt lymphoma, Chronic myeloid monocytic leukemia (CMML), Eosinphilia, Essential thrombocytosis, Hairy cell leukemia, and NK cell lymphoma.

[0227] The methods and compositions described herein can be used alone or in combination with other therapeutic agents and/or modalities. The term administered “in combination,” as used herein, is understood to mean that two (or more) different treatments are delivered to the subject during the course of the subject's affliction with the disorder, such that the effects of the treatments on the patient overlap at a point in time. In certain embodiments, the delivery of one treatment is still occurring when the delivery of the second begins, so that there is overlap in terms of administration. This is sometimes referred to herein as “simultaneous” or “concurrent delivery.” In other embodiments, the delivery of one treatment ends before the delivery of the other treatment begins. In certain embodiments of either case, the treatment is more effective because of combined administration. For example, the second treatment is more effective, e.g., an equivalent effect is seen with less of the second treatment, or the second treatment reduces symptoms to a greater extent, than would be seen if the second treatment were administered in the absence of the first treatment, or the analogous situation is seen with the first treatment. In certain embodiments, delivery is such that the reduction in a symptom, or other parameter related to the disorder is greater than what would be observed with one treatment delivered in the absence of the other. The effect of the two treatments can be partially additive, wholly additive, or greater than additive. The delivery can be such that an effect of the first treatment delivered is still detectable when the second is delivered.

[0228] In certain embodiments, a method or composition described herein, is administered in combination with one or more additional therapies, e.g., surgery, radiation therapy, or administration of another therapeutic preparation. In certain embodiments, the additional therapy may include chemotherapy, e.g., a cytotoxic agent. In certain embodiments the additional therapy may include a targeted therapy, e.g. a tyrosine kinase inhibitor, a proteasome inhibitor, or a protease inhibitor. In certain embodiments, the additional therapy may include an anti-inflammatory, anti-angiogenic, anti-fibrotic, or anti-proliferative compound, e.g., a steroid, a biologic immunomodulator, a monoclonal antibody, an antibody fragment, an aptamer, an siRNA, an antisense molecule, a fusion protein, a cytokine, a cytokine receptor, a bronchodialator, a statin, an anti-inflammatory agent (e.g. methotrexate), or an NSAID. In certain embodiments, the additional therapy may include a combination of therapeutics of different classes.

[0229] In certain embodiments, a method or composition described herein is administered in combination with a checkpoint inhibitor. The checkpoint inhibitor may, for example, be selected from a PD-1 antagonist, PD-L1 antagonist, CTLA-4 antagonist, adenosine A2A receptor antagonist, B7-H3 antagonist, B7-H4 antagonist, BTLA antagonist, KIR antagonist, LAG3 antagonist, TIM-3 antagonist, VISTA antagonist or TIGIT antagonist.

[0230] In certain embodiments, the checkpoint inhibitor is a PD-1 or PD-L1 inhibitor. PD-1 is a receptor present on the surface of T-cells that serves as an immune system checkpoint that inhibits or otherwise modulates T-cell activity at the appropriate time to prevent an overactive immune response. Cancer cells, however, can take advantage of this checkpoint by expressing ligands, for example, PD-L1, that interact with PD-1 on the surface of T-cells to shut down or modulate T-cell activity. Exemplary PD-1/PD-L1 based immune checkpoint inhibitors include antibody based therapeutics. Exemplary treatment methods that employ PD-1/PD-L1 based immune checkpoint inhibition are described in U.S. Pat. Nos. 8,728,474 and 9,073,994, and EP Patent No. 1537878B1, and, for example, include the use of anti-PD-1 antibodies. Exemplary anti-PD-1 antibodies are described, for example, in U.S. Pat. Nos. 8,952,136, 8,779,105, 8,008,449, 8,741,295, 9,205,148, 9,181,342, 9,102,728, 9,102,727, 8,952,136, 8,927,697, 8,900,587, 8,735,553, and 7,488,802. Exemplary anti-PD-1 antibodies include, for example, nivolumab (Opdivo®, Bristol-Myers Squibb Co.), pembrolizumab (Keytruda®, Merck Sharp & Dohme Corp.), PDR001 (Novartis Pharmaceuticals), and pidilizumab (CT-011, Cure Tech). Exemplary anti-PD-L1 antibodies are described, for example, in U.S. Pat. Nos. 9,273,135, 7,943,743, 9,175,082, 8,741,295, 8,552,154, and 8,217,149. Exemplary anti-PD-L1 antibodies include, for example, atezolizumab (Tecentriq®, Genentech), duvalumab (AstraZeneca), MEDI4736, avelumab, and BMS 936559 (Bristol Myers Squibb Co.).

[0231] In certain embodiments, a method or composition described herein is administered in combination with a CTLA-4 inhibitor. In the CTLA-4 pathway, the interaction of CTLA-4 on a T-cell with its ligands (e.g., CD80, also known as B7-1, and CD86) on the surface of an antigen presenting cells (rather than cancer cells) leads to T-cell inhibition. Exemplary CTLA-4 based immune checkpoint inhibition methods are described in U.S. Pat. Nos. 5,811,097, 5,855,887, 6,051,227. Exemplary anti-CTLA-4 antibodies are described in U.S. Pat. Nos. 6,984,720, 6,682,736, 7,311,910; 7,307,064, 7,109,003, 7,132,281, 6,207,156, 7,807,797, 7,824,679, 8,143,379, 8,263,073, 8,318,916, 8,017,114, 8,784,815, and 8,883,984, International (PCT) Publication Nos. WO98/42752, WO00/37504, and WO01/14424, and European Patent No. EP 1212422 Bi. Exemplary CTLA-4 antibodies include ipilimumab or tremelimumab.

[0232] Exemplary cytotoxic agents that can be administered in combination with a method or composition described herein include, for example, antimicrotubule agents, topoisomerase inhibitors, antimetabolites, protein synthesis and degradation inhibitors, mitotic inhibitors, alkylating agents, platinating agents, inhibitors of nucleic acid synthesis, histone deacetylase inhibitors (HDAC inhibitors, e.g., vorinostat (SAHA, MK0683), entinostat (MS-275), panobinostat (LBH589), trichostatin A (TSA), mocetinostat (MGCD0103), belinostat (PXD101), romidepsin (FK228, depsipeptide)), DNA methyltransferase inhibitors, nitrogen mustards, nitrosoureas, ethylenimines, alkyl sulfonates, triazenes, folate analogs, nucleoside analogs, ribonucleotide reductase inhibitors, vinca alkaloids, taxanes, epothilones, intercalating agents, agents capable of interfering with a signal transduction pathway, agents that promote apoptosis and radiation, or antibody molecule conjugates that bind surface proteins to deliver a toxic agent. In one embodiment, the cytotoxic agent that can be administered with a method or composition described herein is a platinum-based agent (such as cisplatin), cyclophosphamide, dacarbazine, methotrexate, fluorouracil, gemcitabine, capecitabine, hydroxyurea, topotecan, irinotecan, azacytidine, vorinostat, ixabepilone, bortezomib, taxanes (e.g., paclitaxel or docetaxel), cytochalasin B, gramicidin D, ethidium bromide, emetine, mitomycin, etoposide, tenoposide, vincristine, vinblastine, vinorelbine, colchicin, anthracyclines (e.g., doxorubicin or epirubicin) daunorubicin, dihydroxy anthracin dione, mitoxantrone, mithramycin, actinomycin D, adriamycin, 1-dehydrotestosterone, glucocorticoids, procaine, tetracaine, lidocaine, propranolol, puromycin, ricin, or maytansinoids.

[0233] Throughout the description, where compositions are described as having, including, or comprising specific components, or where processes and methods are described as having, including, or comprising specific steps, it is contemplated that, additionally, there are compositions of the present invention that consist essentially of, or consist of, the recited components, and that there are processes and methods according to the present invention that consist essentially of, or consist of, the recited processing steps.

[0234] In the application, where an element or component is said to be included in and/or selected from a list of recited elements or components, it should be understood that the element or component can be any one of the recited elements or components, or the element or component can be selected from a group consisting of two or more of the recited elements or components.

[0235] Further, it should be understood that elements and/or features of a composition or a method described herein can be combined in a variety of ways without departing from the spirit and scope of the present invention, whether explicit or implicit herein. For example, where reference is made to a particular compound, that compound can be used in various embodiments of compositions of the present invention and/or in methods of the present invention, unless otherwise understood from the context. In other words, within this application, embodiments have been described and depicted in a way that enables a clear and concise application to be written and drawn, but it is intended and will be appreciated that embodiments may be variously combined or separated without parting from the present teachings and invention(s). For example, it will be appreciated that all features described and depicted herein can be applicable to all aspects of the invention(s) described and depicted herein.

[0236] It should be understood that the expression “at least one of” includes individually each of the recited objects after the expression and the various combinations of two or more of the recited objects unless otherwise understood from the context and use. The expression “and/or” in connection with three or more recited objects should be understood to have the same meaning unless otherwise understood from the context.

[0237] The use of the term “include,” “includes,” “including,” “have,” “has,” “having,” “contain,” “contains,” or “containing,” including grammatical equivalents thereof, should be understood generally as open-ended and non-limiting, for example, not excluding additional unrecited elements or steps, unless otherwise specifically stated or understood from the context.

[0238] Where the use of the term “about” is before a quantitative value, the present invention also includes the specific quantitative value itself, unless specifically stated otherwise. As used herein, the term “about” refers to a ±10% variation from the nominal value unless otherwise indicated or inferred.

[0239] It should be understood that the order of steps or order for performing certain actions is immaterial so long as the present invention remain operable. Moreover, two or more steps or actions may be conducted simultaneously.

[0240] The use of any and all examples, or exemplary language herein, for example, “such as” or “including,” is intended merely to illustrate better the present invention and does not pose a limitation on the scope of the invention unless claimed. No language in the specification should be construed as indicating any non-claimed element as essential to the practice of the present invention.

### EXAMPLES

[0241] The following Examples are merely illustrative and are not intended to limit the scope or content of the invention in any way.

### Example 1

[0242] This example describes the construction of recombinant human sialidases (Neu1, Neu2, Neu3, and Neu 4).

[0243] The human sialidases Neu1, Neu2, Neu3 (isoform 1), and Neu4 (isoform 1) were expressed as secreted proteins with a 10×His tag (SEQ ID NO: 157). To express Neu1 as a secreted protein, the native N terminal signal peptide (MTGERPSTALPDRRWGPRILGFWGGCRVWVFAAIFLLLSLAASWSKA; SEQ ID NO: 80) was replaced by MDMRVPAQLLGLLLLWLPGARC (SEQ ID NO: 32), and the C terminal lysosomal signal motif (YGTL; SEQ ID NO: 33) was removed. To express Neu2, Neu3, and Neu4 as secreted proteins, the N terminal signal peptide MDMRVPAQLLGLLLLWLPGARC (SEQ ID NO: 32) was added to each.

[0244] Sialidases were expressed in a 200 mL transfection of HEK293F human cells in 24-well plates using the pCEP4 mammalian expression vector. Sialidases were purified using Ni-NTA columns, quantified with a UV-Vis spectrophotometer (NanoDrop), and examined by SDS-PAGE as shown in FIG. 2. Neu1 expressed well, with a yield of ˜3 μg/ml, and was present primarily in a monomeric form. Neu2 and Neu3 expression each gave yields of ˜0.15 μg/mL and each were present primarily in a dimeric form. Neu4 had no detectable expression yield as measured by NanoDrop. Bacterial sialidase from Salmonella typhimurium (St-sialidase; SEQ ID NO: 7), which was used as a positive control for expression, gave a comparable yield to Neu1, and was present primarily in a monomeric form.

[0245] The activity of the recombinantly expressed sialidases was assayed by measuring the release of sialic acid from the fluorogenic substrate 4-methylumbelliferyl-N-acetylneuraminic acid (4MU-NeuAc). As shown in FIG. 3, Neu1 has no detectable activity above a no-enzyme control, which is consistent with previous reports indicating that Neu1 is inactive unless it is in complex with beta-galactosidase and protective protein/cathepsin A (PPCA). Neu2 and Neu3 were active. An enzyme kinetics assay was performed with Neu2 and Neu3. A fixed concentration of enzyme at 1 nM was incubated with fluorogenic substrate 4MU-NeuAc at concentrations ranging from 4000 μM to 7.8 μM. Assays were conducted at both acidic (pH 5.6) and neutral (pH 7) conditions. As shown in FIG. 4, both Neu2 and Neu3 were active at acidic and neutral conditions and showed enzyme kinetics that were comparable to those previously reported.

### Example 2

[0246] This example describes the degree of sialic acid removal from three human cancer target cell lines by neuraminidase constructs of the current invention. Specifically, Raji Burkitt lymphoma cells, Ramos lymphoma cells and SKOV-3 ovarian cells were treated for 16 hours using either neuraminidase construct #1 (a mutant Neu2-Fc protein having amino acid sequence SEQ ID NO: 149 encoded by nucleotide sequence SEQ ID NO: 156), a mutant neuraminidase lacking enzymatic activity (a similar mutant Neu2-Fc protein that also contains an E218A active site mutation that results in loss of neuraminidase function, “LOF”), or left untreated (No Tx). Cells were then stained with PNA, a lectin that binds to terminal galactose residues. An increase in PNA staining is indicative of the removal of terminal sialic acids by the neuraminidase and exposure of the underlying galactose. As seen in FIG. 5, all three cell lines demonstrated increased PNA staining to differing degrees by neuraminidase construct #1 as compared to LOF or No Tx. SKOV-3 experienced a high level of sialic acid removal, Ramos cells experienced an intermediate level of sialic acid removal and Raji cells experienced a lower level of sialic acid removal.

### Example 3

[0247] This example describes the effect of neuraminidase cotreatment on CAR-T cell engagement of target cells using neuraminidase constructs of the current invention. Specifically, the engagement by CD19 directed CAR-T engineered cells of Raji Burkitt lymphoma cells and Ramos lymphoma cells in the continued presence of neuraminidase for 16 hours was examined. Raji and Ramos cells, both of which are CD19 positive human cancer cells, were incubated with anti-CD19-ScFv-CD28-CD3zeta cells (ProMab Biotechnologies, Inc., Richmond, CA). The CAR-T cells and target cells were plated at the indicated E:T ratios in the presence of either neuraminidase construct #1 or LOF neuraminidase (100 μg/ml final concentration) with subsequent analysis of conditioned media following 16 hours incubation at 37° C. CAR-T cells were also plated out alone with no target cells (E:T ratio of 1:0). For all experiments the 1:0 ratio utilized 10,000 CAR-T cells and no target cells; the 1:1 ratio utilized 10,000 CAR-T cells and 10,000 target cells; the 1:2 ratio utilized 5,000 CAR-T cells and 10,000 target cells. Each condition was tested in quadruplicate.

[0248] FIG. 6 depicts the degree of sialic acid removal from the CD19 positive Raji cells (FIG. 6A) and CD3 positive CAR-T cells (FIG. 6B) following 16 hours cotreatment with neuraminidase. Specifically, both target and effector cell were analyzed for PNA staining following 16 hours with either the LOF neuraminidase, neuraminidase construct #1 or untreated cells (No Tx). Neuraminidase construct #1 resulted in a significant increase in PNA staining in both Raji target cells and CAR-T cells indicating efficient removal of terminal sialic acids on the cell surface.

[0249] FIG. 7 depicts the degree of sialic acid removal from the CD19 positive Ramos cells (FIG. 7A) and CD3 positive CAR-T cells (FIG. 7B) following 16 hours cotreatment with neuraminidase construct #1. Specifically, both target and effector cells were analyzed for PNA staining following 16 hours with either the LOF neuraminidase, neuraminidase construct #1 or untreated cells (No Tx). Neuraminidase construct #1 resulted in a significant increase in PNA staining in both Ramos target cells and CAR-T cells indicating efficient removal of terminal sialic acids on the cell surface.

[0250] FIG. 8 depicts the analysis of secreted cytokines from the cells at the 16 hour time point. Specifically, following incubation of the CAR-T cells and the Raji cells with neuraminidase construct #1 for 16 hours, the cells were removed and the conditioned media analyzed for IFN-gamma, IL-2, IL-10, IL-6 and TNF-alpha by flow multiplex (LegendPlex). In each panel, the No Tx, LOF and neuraminidase construct #1 (respectively) analysis in quadruplicate assays at the indicated E:T ratio is shown. Neuraminidase treatment increased expression of IFN-gamma (FIG. 8A), IL-2 (FIG. 8B) and TNF-alpha (FIG. 8C) as compared to LOF or No Tx. No changes to IL-10 or IL-6 were observed between neuraminidase treatment as compared to LOF or No Tx.

[0251] FIG. 9 depicts the analysis of Siglec7 and Siglec9 expression on CAR-T cells as compared to PBMCs used as a positive control. Specifically, CAR-T cells prepared from two independent donors (ProMab Biotechnologies Inc., Richmond, CA; Lot-032919 and Lot-042518) or PBMCs from a healthy donor were stained for Siglec7 expression (left panels) or for Siglec9 expression (right panels) and compared to isotype staining. For both CAR-T cell donor preparations, Siglec7 and Siglec9 specific, uniform staining was observed (light grey staining) versus isotype control (dark grey staining).

### Example 4

[0252] This example describes the testing of sialidases for their ability to increase the efficacy of chimeric antigen receptor (CAR) T-cell immunotherapies for solid malignancies.

[0253] To generate a DNA sequence encoding a tumor-specific CAR, a DNA sequence encoding a fully human single chain Fv specific for a tumor antigen (for example, m912 specific for mesothelin (Feng et al. (2009) MOL. CANCER THER. 8(5):1113-1118) is fused to a DNA encoding the CD8/CD3ζ, CD28/CD3ζ, or CD8/4-1BB/CD3ζ domain (see, for example, Zhong et al. (2010) Mol Ther. 18(2):413-420, or as available from ProMab Biotechnologies Inc., Richmond, CA). Alternatively, the CAR can target different tumor antigens such CD19, CD133, Her-2, EGFR, or VEGFR-2 that are highly over-expressed in tumors (using, for example, CARs as available from ProMab Biotechnologies Inc., Richmond, CA). Exemplary promoters for expression of a CAR construct include retroviral LTR, the SV40 promoter, or the human cytomegalovirus (CMV) promoter.

[0254] Exemplary DNA sequences encoding a sialidase include SEQ ID NO: 9, SEQ ID NO: 10, SEQ ID NO: 11, SEQ ID NO: 12, SEQ ID NO: 13, SEQ ID NO: 14, SEQ ID NO: 15, and SEQ ID NO: 16.

[0255] Exemplary promoters for expression of a sialidase construct include the PD-1 promoter, the NFAT promoter or an inducible promoter such as the tetracycline promoter. To express a sialidase as a secreted protein, an N terminal signal peptide (e.g., MDMRVPAQLLGLLLLWLPGARC; SEQ ID NO: 32) may be added or may replace a native N terminal signal peptide. A sialidase may be expressed alone, or with a tag, e.g., a human Fc tag. A sialidase may also be expressed as an antibody-sialidase genetic fusion protein, or as an antibody sialidase conjugate (ASC) containing the fusion protein.

[0256] The architecture for three exemplary ASCs is depicted in FIG. 1. The first type of ASC, referred to as “Raptor,” includes an antibody (with two heavy chains and two light chains) with a sialidase fused at the C-terminus of each heavy chain of the antibody. The second type of ASC, referred to as “Janus,” contains one antibody arm (with one heavy chain and one light chain), and one sialidase-Fc fusion with a sialidase fused at the N-terminus of the Fc. Each Fc domain polypeptide in the Janus ASC contains either the “knob” (T366Y) or “hole” (Y407T) mutation for heterodimerization (residue numbers according to EU numbering, Kabat, E. A., et al. (1991) supra). The third type of ASC, referred to as “Lobster,” contains two Fc domain polypeptides each with a sialidase fused at the N-terminus of the Fc and a scFv fused at the C-terminus of the Fc. An exemplary Lobster ASC (amino acid sequence SEQ ID NO: 43, encoded by nucleic acid sequence SEQ ID NO: 55) includes a mutant human Neu2 (including a deletion of M1 and V6Y and I187K substitutions) and a scFv derived from trastuzumab.

[0257] The CAR sequence and sialidase sequence are inserted into the same or separate γ-retroviral vectors. The CAR- and sialidase-encoding plasmids are then transfected into 293T H29 and 293VecRD114 packaging cell lines to produce a retrovirus, as previously described (Hollyman et al. (2009) J. IMMUNOTHER. 32(2):169-180).

[0258] Peripheral blood mononuclear cells (PBMCs) are isolated by low-density centrifugation on Lymphoprep (Stem Cell Technology) and activated with phytohemagglutinin (2 μg/ml; Remel). Two days after isolation, PBMCs are transduced with 293VecRD114-produced retroviral particles encoding the CAR and/or sialidase and spinoculated for 1 hour at 1,800×g on plates coated with retronectin (15 g/ml; r-Fibronectin, Takara). Transduced PBMCs are maintained in IL-2 (20 UI/ml; Novartis). Pure populations of CD4+, CD8+, CAR+, and/or sialidase+ T cells are obtained by flow cytometry-based sorting.

[0259] An orthotopic mouse model of pleural mesothelioma using female NOD/SCID7 mice (The Jackson Laboratory) aged 4 to 6 weeks is used. Alternatively, NSG/NOG xenograft survival and imaging studies can be used to characterize CAR-T cell function in vivo. Mice are anesthetized using inhaled isoflurane and oxygen, with bupivacaine administered for analgesia. Direct intrapleural injection of 1×10⁵ to 1×10⁶ tumor cells in 200 μl of serum-free medium via a right thoracic incision is performed to establish orthotopic tumors. Additional tumor models include those using mouse ovarian tumor lines.

[0260] Tumor-bearing mice are treated with or without 4×10⁴ to 1×10⁵ transduced T cells (in 200 μl of serum-free medium) adoptively transferred into the thoracic cavity by direct intrapleural injection. Additionally, tumor-bearing mice are treated with or without a sialidase, injected intraperitoneally at, for example, 10 mg/kg every 5 days. Tumor growth is monitored and quantified in vivo by bioluminescence imaging.

[0261] Comparison is made of mice bearing tumors alone, mice treated with T cells engineered to express the CAR alone and mice treated with T cells engineered to express CAR and the sialidase. Alternatively, comparison is made of mice bearing tumors alone, mice treated with T cells engineered to express the CAR alone and mice treated with T cells engineered to express CAR and a sialidase.

### INCORPORATION BY REFERENCE

[0262] The entire disclosure of each of the patent and scientific documents referred to herein is incorporated by reference for all purposes.

### EQUIVALENTS

[0263] The invention may be embodied in other specific forms without departing from the spirit or essential characteristics thereof. The foregoing embodiments are therefore to be considered in all respects illustrative rather than limiting on the invention described herein. Scope of the invention is thus indicated by the appended claims rather than by the foregoing description, and all changes that come within the meaning and range of equivalency of the claims are intended to be embraced therein.

1. An isolated immune cell modified to have increased sialidase activity relative to a similar or identical cell that has not been modified.

2. (canceled)

3. The isolated immune cell of claim 1, wherein the sialidase is a eukaryotic sialidase.

4. The isolated immune cell of claim 3, wherein the sialidase is a mammalian sialidase.

5. (canceled)

6. The isolated immune cell of claim 4, wherein the sialidase is a human sialidase selected from Neu1, Neu2, Neu3 and Neu4.

7. The isolated immune cell of claim 4, wherein the sialidase comprises an amino acid sequence selected from SEQ ID NO: 1, SEQ ID NO: 2, SEQ ID NO: 3, SEQ ID NO: 4, SEQ ID NO: 5, and SEQ ID NO: 6.

8. The isolated immune cell of claim 1, wherein the sialidase is a prokaryotic sialidase.

9. The isolated immune cell of claim 8, wherein the sialidase is selected from a Salmonella typhimurium sialidase and a Vibrio cholera sialidase.

10. The isolated immune cell of claim 8, wherein the sialidase comprises an amino acid sequence selected from SEQ ID NO: 7 and SEQ ID NO: 8.

11. (canceled)

12. The isolated immune cell of claim 1, wherein the sialidase is a mutant sialidase.

13. The isolated immune cell of claim 12, wherein the mutant sialidase comprises an amino acid sequence selected from SEQ ID NO: 36, SEQ ID NO: 37, SEQ ID NO: 38, SEQ ID NO: 39, SEQ ID NO: 63, SEQ ID NO: 64, SEQ ID NO: 65, SEQ ID NO: 66, SEQ ID NO: 83, SEQ ID NO: 84, SEQ ID NO: 85, SEQ ID NO: 86, SEQ ID NO: 87, SEQ ID NO: 88, and SEQ ID NO: 89.

14. (canceled)

15. The isolated immune cell of claim 1, wherein the immune cell is selected from a T-cell, a Tumor Infiltrating Lymphocyte (TIL), and a natural killer (NK) cell.

16. (canceled)

17. The isolated immune cell of claim 1, wherein the immune cell further comprises an exogenous nucleotide sequence encoding a chimeric antigen receptor (CAR).

18. The isolated immune cell of claim 17, wherein the CAR binds a cancer antigen.

19. The isolated immune cell of claim 18, wherein the cancer antigen is selected from mesothelin, prostate specific membrane antigen (PSMA), prostate stem cell antigen (PCSA), carbonic anhydrase IX (CAIX), carcinoembryonic antigen (CEA), CD5, CD7, CD10, CD19, CD20, CD22, CD30, CD33, CD34, CD38, CD41, CD44, CD47, CD49f, CD56, CD74, CD123, CD133, CD138, epithelial glycoprotein2 (EGP 2), epithelial glycoprotein-40 (EGP-40), epithelial cell adhesion molecule (EpCAM), folate-binding protein (FBP), fetal acetylcholine receptor (AChR), folate receptor-α and β (FRa and β), Ganglioside G2 (GD2), Ganglioside G3 (GD3), an Epidermal Growth Factor Receptor (EGFR), Epidermal Growth Factor Receptor 2 (HER-2/ERB2), Epidermal Growth Factor Receptor vIII (EGFRvIII), ERB3, ERB4, human telomerase reverse transcriptase (hTERT), Interleukin-13 receptor subunit alpha-2 (IL-13Ra2), K-light chain, kinase insert domain receptor (KDR), Lewis A (CA19.9), Lewis Y (LeY), LI cell adhesion molecule (LICAM), melanoma-associated antigen 1 (melanoma antigen family A1, MAGE-A1), Mucin 16 (MUC-16), Mucin 1 (MUC-1), KG2D ligands, cancer-testis antigen NY-ESO-1, oncofetal antigen (h5T4), tumor-associated glycoprotein 72 (TAG-72), vascular endothelial growth factor R2 (VEGF-R2), Wilms tumor protein (WT-1), type 1 tyrosine-protein kinase transmembrane receptor (ROR1), B7-H3 (CD276), B7-H6 (Nkp30), Chondroitin sulfate proteoglycan-4 (CSPG4), DNAX Accessory Molecule (DNAM-1), Ephrin type A Receptor 2 (EpHA2), Fibroblast Associated Protein (FAP), Gp100/HLA-A2, Glypican 3 (GPC3), HA-IH, HERK-V, IL-1 IRa, Latent Membrane Protein 1 (LMP1), Neural cell-adhesion molecule (N-CAM/CD56), programmed cell death receptor ligand 1 (PD-L1), B Cell Maturation Antigen (BCMA), and Trail Receptor (TRAIL R).

20. (canceled)

21. A pharmaceutical composition comprising the isolated immune cell of claim 1, and a pharmaceutically acceptable carrier or diluent.

22. A pharmaceutical composition comprising:
(a) an isolated immune cell;
(b) a sialidase; and
(c) a pharmaceutically acceptable carrier or diluent.

23.-42. (canceled)

43. A method of treating cancer in a subject in need thereof, the method comprising administering to the subject an effective amount of the isolated immune cell of claim 1, thereby to treat the cancer in the subject.

44. (canceled)

45. A method of treating cancer in a subject in need thereof, the method comprising administering to the subject an effective amount of the pharmaceutical composition of claim 21, thereby to treat the cancer in the subject.

46. A method of treating cancer in a subject in need thereof, the method comprising administering to the subject an isolated immune cell and a sialidase, thereby to treat the cancer in the subject.

47.-66. (canceled)

67. The method of claim 46, wherein the isolated immune cell and the sialidase are administered separately or in combination.

68. The method of claim 46, wherein the isolated immune cell and the sialidase are administered at the same time.

69.-81. (canceled)

The application's sequence listing, which the Patent Office published only in electronic form, follows.

SEQUENCE LISTING (161 sequences)

SEQ ID NO: 1 - protein, 364 aa, Homo sapiens
ENDFGLVQPLVTMEQLLWVSGRQIGSVDTFRIPLITATPRGTLLAFAEARKMSSSDEGAKFIALRRSMDQGSTWSPTAFIVNDGDVPDGLNLGAVVSDVETGVVFLFYSLCAHKAGCQVASTMLVWSKDDGVSWSTPRNLSLDIGTEVFAPGPGSGIQKQREPRKGRLIVCGHGTLERDGVFCLLSDDHGASWRYGSGVSGIPYGQPKQENDFNPDECQPYELPDGSVVINARNQNNYHCHCRIVLRSYDACDTLRPRDVTFDPELVDPVVAAGAVVTSSGIVFFSNPAHPEFRVNLTLRWSFSNGTSWRKETVQLWPGPSGYSSLATLEGSMDGEEQAPQLYVLYEKGRNHYTESISVAKISV

SEQ ID NO: 2 - protein, 380 aa, Homo sapiens
MASLPVLQKESVFQSGAHAYRIPALLYLPGQQSLLAFAEQRASKKDEHAELIVLRRGDYDAPTHQVQWQAQEVVAQARLDGHRSMNPCPLYDAQTGTLFLFFIAIPGQVTEQQQLQTRANVTRLCQVTSTDHGRTWSSPRDLTDAAIGPAYREWSTFAVGPGHCLQLHDRARSLVVPAYAYRKLHPIQRPIPSAFCFLSHDHGRTWARGHFVAQDTLECQVAEVETGEQRVVTLNARSHLRARVQAQSTNDGLDFQESQLVKKLVEPPPQGCQGSVISFPSPRSGPGSPAQWLLYTHPTHSWQRADLGAYLNPRPPAPEAWSEPVLLAKGSCAYSDLQSMGTGPDGSPLFGCLYEANDYEEIVFLMFTLKQAFPAEYLPQ

SEQ ID NO: 3 - protein, 428 aa, Homo sapiens
MEEVTTCSFNSPLFRQEDDRGITYRIPALLYIPPTHTFLAFAEKRSTRRDEDALHLVLRRGLRIGQLVQWGPLKPLMEATLPGHRTMNPCPVWEQKSGCVFLFFICVRGHVTERQQIVSGRNAARLCFIYSQDAGCSWSEVRDLTEEVIGSELKHWATFAVGPGHGIQLQSGRLVIPAYTYYIPSWFFCFQLPCKTRPHSLMIYSDDLGVTWHHGRLIRPMVTVECEVAEVTGRAGHPVLYCSARTPNRCRAEALSTDHGEGFQRLALSRQLCEPPHGCQGSVVSFRPLEIPHRCQDSSSKDAPTIQQSSPGSSLRLEEEAGTPSESWLLYSHPTSRKQRVDLGIYLNQTPLEAACWSRPWILHCGPCGYSDLAALEEEGLFGCLFECGTKQECEQIAFRLFTHREILSHLQGDCTSPGRNPSQFKSN

SEQ ID NO: 4 - protein, 461 aa, Homo sapiens
MRPADLPPRPMEESPASSSAPTETEEPGSSAEVMEEVTTCSFNSPLFRQEDDRGITYRIPALLYIPPTHTFLAFAEKRSTRRDEDALHLVLRRGLRIGQLVQWGPLKPLMEATLPGHRTMNPCPVWEQKSGCVFLFFICVRGHVTERQQIVSGRNAARLCFIYSQDAGCSWSEVRDLTEEVIGSELKHWATFAVGPGHGIQLQSGRLVIPAYTYYIPSWFFCFQLPCKTRPHSLMIYSDDLGVTWHHGRLIRPMVTVECEVAEVTGRAGHPVLYCSARTPNRCRAEALSTDHGEGFQRLALSRQLCEPPHGCQGSVVSFRPLEIPHRCQDSSSKDAPTIQQSSPGSSLRLEEEAGTPSESWLLYSHPTSRKQRVDLGIYLNQTPLEAACWSRPWILHCGPCGYSDLAALEEEGLFGCLFECGTKQECEQIAFRLFTHREILSHLQGDCTSPGRNPSQFKSN

SEQ ID NO: 5 - protein, 484 aa, Homo sapiens
MGVPRTPSRTVLFERERTGLTYRVPSLLPVPPGPTLLAFVEQRLSPDDSHAHRLVLRRGTLAGGSVRWGALHVLGTAALAEHRSMNPCPVHDAGTGTVFLFFIAVLGHTPEAVQIATGRNAARLCCVASRDAGLSWGSARDLTEEAIGGAVQDWATFAVGPGHGVQLPSGRLLVPAYTYRVDRRECFGKICRTSPHSFAFYSDDHGRTWRCGGLVPNLRSGECQLAAVDGGQAGSFLYCNARSPLGSRVQALSTDEGTSFLPAERVASLPETAWGCQGSIVGFPAPAPNRPRDDSWSVGPGSPLQPPLLGPGVHEPPEEAAVDPRGGQVPGGPFSRLQPRGDGPRQPGPRPGVSGDVGSWTLALPMPFAAPPQSPTWLLYSHPVGRRARLHMGIRLSQSPLDPRSWTEPWVIYEGPSGYSDLASIGPAPEGGLVFACLYESGARTSYDEISFCTFSLREVLENVPASPKPPNLGDKPRGCCWPS

SEQ ID NO: 6 - protein, 496 aa, Homo sapiens
MMSSAAFPRWLSMGVPRTPSRTVLFERERTGLTYRVPSLLPVPPGPTLLAFVEQRLSPDDSHAHRLVLRRGTLAGGSVRWGALHVLGTAALAEHRSMNPCPVHDAGTGTVFLFFIAVLGHTPEAVQIATGRNAARLCCVASRDAGLSWGSARDLTEEAIGGAVQDWATFAVGPGHGVQLPSGRLLVPAYTYRVDRRECFGKICRTSPHSFAFYSDDHGRTWRCGGLVPNLRSGECQLAAVDGGQAGSFLYCNARSPLGSRVQALSTDEGTSFLPAERVASLPETAWGCQGSIVGFPAPAPNRPRDDSWSVGPGSPLQPPLLGPGVHEPPEEAAVDPRGGQVPGGPFSRLQPRGDGPRQPGPRPGVSGDVGSWTLALPMPFAAPPQSPTWLLYSHPVGRRARLHMGIRLSQSPLDPRSWTEPWVIYEGPSGYSDLASIGPAPEGGLVFACLYESGARTSYDEISFCTFSLREVLENVPASPKPPNLGDKPRGCCWPS

SEQ ID NO: 7 - protein, 381 aa, Salmonella typhimurium
TVEKSVVFKAEGEHFTDQKGNTIVGSGSGGTTKYFRIPAMCTTSKGTIVVFADARHNTASDQSFIDTAAARSTDGGKTWNKKIAIYNDRVNSKLSRVMDPTCIVANIQGRETILVMVGKWNNNDKTWGAYRDKAPDTDWDLVLYKSTDDGVTFSKVETNIHDIVTKNGTISAMLGGVGSGLQLNDGKLVFPVQMVRTKNITTVLNTSFIYSTDGITWSLPSGYCEGFGSENNIIEFNASLVNNIRNSGLRRSFETKDFGKTWTEFPPMDKKVDNRNHGVQGSTITIPSGNKLVAAHSSAQNKNNDYTRSDISLYAHNLYSGEVKLIDDFYPKVGNASGAGYSCLSYRKNVDKETLYVVYEANGSIEFQDLSRHLPVIKSYN

SEQ ID NO: 8 - protein, 781 aa, Vibrio cholera
MRFKNVKKTALMLAMFGMATSSNAALFDYNATGDTEFDSPAKQGWMQDNTNNGSGVLTNADGMPAWLVQGIGGRAQWTYSLSTNQHAQASSFGWRMTTEMKVLSGGMITNYYANGTQRVLPIISLDSSGNLVVEFEGQTGRTVLATGTAATEYHKFELVFLPGSNPSASFYFDGKLIRDNIQPTASKQNMIVWGNGSSNTDGVAAYRDIKFEIQGDVIFRGPDRIPSIVASSVTPGVVTAFAEKRVGGGDPGALSNTNDIITRTSRDGGITWDTELNLTEQINVSDEFDFSDPRPIYDPSSNTVLVSYARWPTDAAQNGDRIKPWMPNGIFYSVYDVASGNWQAPIDVTDQVKERSFQIAGWGGSELYRRNTSLNSQQDWQSNAKIRIVDGAANQIQVADGSRKYVVTLSIDESGGLVANLNGVSAPIILQSEHAKVHSFHDYELQYSALNHTTTLFVDGQQITTWAGEVSQENNIQFGNADAQIDGRLHVQKIVLTQQGHNLVEFDAFYLAQQTPEVEKDLEKLGWTKIKTGNTMSLYGNASVNPGPGHGITLTRQQNISGSQNGRLIYPAIVLDRFFLNVMSIYSDDGGSNWQTGSTLPIPFRWKSSSILETLEPSEADMVELQNGDLLLTARLDFNQIVNGVNYSPRQQFLSKDGGITWSLLEANNANVFSNISTGTVDASITRFEQSDGSHFLLFTNPQGNPAGTNGRQNLGLWFSFDEGVTWKGPIQLVNGASAYSDIYQLDSENAIVIVETDNSNMRILRMPITLLKQKLTLSQN

SEQ ID NO: 9 - DNA, 1092 bp, Homo sapiens
gagaacgactttggactggtgcagcctctggtcaccatggaacagctgctgtgggtttccggcagacagatcggcagcgtggacaccttcagaatccctctgatcaccgccacacctagaggcaccctgctggcctttgccgaggccagaaagatgagcagctctgacgagggcgccaagtttattgccctgaggcggtctatggaccagggctctacatggtcccctaccgccttcatcgtgaacgatggcgacgtgcccgatggcctgaatctgggagctgtggtgtccgatgtggaaaccggcgtggtgttcctgttctacagcctgtgtgcccacaaggccggttgtcaggtggccagcacaatgctcgtgtggtccaaggacgacggcgtgtcctggtctacccctagaaacctgagcctggacatcggcaccgaagtgtttgctccaggacctggctctggcatccagaagcagagagagcccagaaagggcagactgatcgtgtgtggccacggcacccttgagagagatggcgttttctgcctgctgagcgacgatcatggcgcctcttggagatacggcagcggagtgtctggaatcccttacggccagcctaagcaagagaacgatttcaaccccgacgagtgccagccttacgagctgcctgatggcagcgtcgtgatcaacgcccggaaccagaacaactaccactgccactgccggatcgtgctgagaagctacgacgcctgcgataccctgcggcctagagatgtgaccttcgatcctgagctggtggaccctgttgttgccgctggtgccgtcgtgacatctagcggcatcgtgttcttcagcaaccctgctcaccccgagttcagagtgaatctgaccctgcggtggtccttcagcaatggcacaagctggcggaaagaaaccgtgcagctttggcctggacctagcggctactcttctctggctacactggaaggcagcatggacggcgaagaacaggcccctcagctgtacgtgctgtacgagaagggcagaaaccactacaccgagagcatcagcgtggccaagatcagcgtt

SEQ ID NO: 10 - DNA, 1140 bp, Homo sapiens
atggccagcctgcctgtgctgcagaaagaaagcgtgttccagtctggcgcccacgcctacagaattcccgctctgctgtatctgccaggccagcagtctctgctggctttcgctgaacagcgggccagcaagaaggatgagcacgccgaactgatcgtgctgcggagaggcgattacgacgcccctacacatcaggtgcagtggcaggctcaagaggtggtggctcaggctagactggacggccacagatctatgaacccctgtcctctgtacgatgcccagaccggcacactgtttctgttctttatcgctatccccggccaagtgaccgagcagcagcagctgcagacaagagccaacgtgaccagactgtgtcaagtgacctccaccgaccacggcagaacctggtctagccctagagatctgaccgacgccgccatcggacctgcctatagagagtggtccaccttcgccgttggacctggacactgtctccagctgcacgacagggctagatctctggtggtgcctgcctacgcctatagaaagctgcaccccatccagcggcctattcctagcgccttctgctttctgagccacgatcacggcaggacatgggccagaggacatttcgtggcccaggacacactggaatgccaggtggccgaagtggaaaccggcgagcagagagtcgtgaccctgaacgccagatctcacctgagagccagagtgcaggcccagagcacaaacgacggcctggatttccaagagagccagctggtcaagaaactggtggaacctcctccacagggctgtcagggaagcgtgatcagctttccatctcctagaagcggccctggctctcctgctcagtggctgctgtatacacaccccacacacagctggcagagagccgatctgggcgcctacctgaatcctagacctcctgctcctgaggcttggagcgaacctgttctgctggccaagggcagctgtgcctacagcgatctgcagtctatgggcacaggccctgatggcagccctctgtttggctgtctgtacgaggccaacgactacgaagagatcgtgttcctgatgttcaccctgaagcaggcctttccagccgagtacctgcctcaa

SEQ ID NO: 11 - DNA, 1284 bp, Homo sapiens
atggaggaagtgaccacctgtagcttcaacagccctctgttccggcaagaggacgaccggggcatcacctacagaatccctgctctgctgtacatccctcctacacacacctttctggccttcgccgagaagcggagcaccagacgagatgaagatgccctgcacctggtgctgagaagaggcctgagaatcggacagctggtgcagtggggacctctgaagcctctgatggaagccacactgcccggccacagaaccatgaatccttgtcctgtgtgggagcagaaaagcggctgcgtgttcctgttcttcatctgcgtgcggggccacgtgaccgagagacagcaaatcgtgtccggcagaaacgccgccagactgtgcttcatctacagccaggatgccggctgctcttggagcgaagttcgggatctgaccgaagaagtgatcggcagcgagctgaagcactgggccacatttgctgttggccctggccacggaatccagctgcaatctggcagactggtcatccccgcctacacctactatatccccagctggttcttctgcttccaactgccttgcaagacccggcctcacagcctgatgatctacagcgacgatctgggcgtgacatggcaccacggcagactgatcagacccatggtcaccgtggaatgcgaggtggccgaagtgacaggcagagctggacaccctgtgctgtactgctctgccagaacacccaaccggtgtagagccgaggctctgtctacagatcacggcgagggctttcagagactggccctctctagacagctgtgcgaacctcctcatggctgtcagggcagcgtggtgtccttcagacctctggaaatccctcaccggtgccaggacagcagctctaaggatgcccctaccatccagcagtctagccctggcagcagcctgagactggaagaggaagccggaacacctagcgagagctggctgctgtactctcaccccaccagcagaaagcagagagtggacctgggcatctacctgaatcagacccctctggaagccgcctgttggagcagaccttggattctgcactgtggcccttgcggctactctgatctggccgctctggaagaagagggcctgttcggctgcctgtttgagtgcggcacaaagcaagagtgcgagcagatcgccttccggctgttcacccacagagagatcctgagccatctgcagggcgactgcacaagcccaggcagaaatcccagccagttcaagagcaac

SEQ ID NO: 12 - DNA, 1383 bp, Homo sapiens
atgagacctgcggacctgcccccgcgccccatggaagaatccccggcgtccagctctgccccgacagagacggaggagccggggtccagtgcagaggtcatggaagaagtgacaacatgctccttcaacagccctctgttccggcaggaagatgacagagggattacctaccggatcccagccctgctctacataccccccacccacaccttcctggcctttgcagagaagcgttctacgaggagagatgaggatgctctccacctggtgctgaggcgagggttgaggattgggcagttggtacagtgggggcccctgaagccactgatggaagccacactaccggggcatcggaccatgaacccctgtcctgtatgggagcagaagagtggttgtgtgttcctgttcttcatctgtgtgcggggccatgtcacagagcgtcaacagattgtgtcaggcaggaatgctgcccgcctttgcttcatctacagtcaggatgctggatgttcatggagtgaggtgagggacttgactgaggaggtcattggctcagagctgaagcactgggccacatttgctgtgggcccaggtcatggcatccagctgcagtcagggagactggtcatccctgcgtatacctactacatcccttcctggttcttttgcttccagctaccatgtaaaaccaggcctcattctctgatgatctacagtgatgacctaggggtcacatggcaccatggtagactcattaggcccatggttacagtagaatgtgaagtggcagaggtgactgggagggctggccaccctgtgctatattgcagtgcccggacaccaaacaggtgccgggcagaggcgctcagcactgaccatggtgaaggctttcagagactggccctgagtcgacagctctgtgagcccccacatggttgccaagggagtgtggtaagtttccggcccctggagatcccacataggtgccaggactctagcagcaaagatgcacccaccattcagcagagctctccaggcagttcactgaggctggaggaggaagctggaacaccgtcagaatcatggctcttgtactcacacccaaccagtaggaaacagagggttgacctaggtatctatctcaaccagacccccttggaggctgcctgctggtcccgcccctggatcttgcactgtgggccctgtggctactctgatctggctgctctggaggaggagggcttgtttgggtgtttgtttgaatgtgggaccaagcaagagtgtgagcagattgccttccgcctgtttacacaccgggagatcctgagtcacctgcagggggactgcaccagccctggtaggaacccaagccaattcaaaagcaat

SEQ ID NO: 13 - DNA, 1452 bp, Homo sapiens
atgggcgtgcccagaacacccagcagaaccgtgctgttcgagagagagaggaccggcctgacctacagagtgccttctctgctgcctgtgcctcctggacctacactgctggccttcgtggaacagagactgagccccgatgattctcacgcccacagactggtgctgagaagaggaacactggctggcggctctgttagatggggagcactgcatgtgctgggcacagctgctcttgccgagcacagatccatgaatccctgtcctgtgcacgacgccggaaccggcacagtgtttctgttctttatcgccgtgctgggccacacacctgaggccgttcaaattgccaccggcagaaatgccgccagactgtgttgtgtggcctccagagatgccggcctgtcttggggatctgccagagatctgaccgaggaagccattggcggagccgttcaggattgggccacatttgctgttggacctggacacggcgtgcagctgccaagtggtagactgctggtgcctgcctacacatacagagtggatcggagagagtgcttcggaaagatctgccggacaagccctcacagcttcgccttctactccgacgatcacggccggacttggagatgtggtggcctggtgcctaatctgagaagcggcgaatgtcaactggccgccgttgatggtggacaggctggcagcttcctgtactgcaacgccagatctcctctgggctctagagtgcaggccctgtctaccgatgagggcaccagttttctgcccgccgaaagagttgcctctctgcctgaaacagcctggggctgtcagggctctatcgtgggatttcctgctcctgctccaaacagaccccgggacgattcttggagtgtcggccctggatctccactgcagcctccattgcttggaccaggcgttcacgagccacctgaagaggctgccgttgatcctagaggcggacaagttcctggcggcccttttagcagactgcagccaagaggcgacggccctagacaacctggaccaagacctggcgtcagcggagatgttggctcttggacactggccctgcctatgccttttgccgctcctcctcagtctcctacctggctgctgtactctcaccctgttggcagacgggccagactgcacatgggcatcagactgtctcagagccctctggaccccagaagctggacagagccttgggtcatctatgagggccctagcggctacagcgatctggcctctattggcccagctcctgaaggcggactggtgttcgcttgtctgtatgagagcggcgccagaaccagctacgacgagatcagcttctgcaccttcagcctgcgcgaggtgctggaaaatgtgcccgcctctcctaagcctcctaacctgggcgataagcctagaggctgttgctggccatct

SEQ ID NO: 14 - DNA, 1488 bp, Homo sapiens
atgatgagctctgcagccttcccaaggtggctgagcatgggggtccctcgtaccccttcacggacagtgctcttcgagcgggagaggacgggcctgacctaccgcgtgccctcgctgctccccgtgccccccgggcccaccctgctggcctttgtggagcagcggctcagccctgacgactcccacgcccaccgcctggtgctgaggaggggcacgctggccgggggctccgtgcggtggggtgccctgcacgtgctggggacagcagccctggcggagcaccggtccatgaacccctgccctgtgcacgatgctggcacgggcaccgtcttcctcttcttcatcgcggtgctgggccacacgcctgaggccgtgcagatcgccacgggaaggaacgccgcgcgcctctgctgtgtggccagccgtgacgccggcctctcgtggggcagcgcccgggacctcaccgaggaggccatcggtggtgccgtgcaggactgggccacattcgctgtgggtcccggccacggtgtgcagctgccctcaggccgcctgctggtacccgcctacacctaccgcgtggaccgccgagagtgttttggcaagatctgccggaccagccctcactccttcgccttctacagcgatgaccacggccgcacctggcgctgtggaggcctcgtgcccaacctgcgctcaggcgagtgccagctggcagcggtggacggtgggcaggccggcagcttcctctactgcaatgcccggagcccactgggcagccgtgtgcaggcgctcagcactgacgagggcacctccttcctgcccgcagagcgcgtggcttccctgcccgagactgcctggggctgccagggcagcatcgtgggcttcccagcccccgcccccaacaggccacgggatgacagttggtcagtgggccccgggagtcccctccagcctccactcctcggtcctggagtccacgaacccccagaggaggctgctgtagacccccgtggaggccaggtgcctggtgggcccttcagccgtctgcagcctcggggggatggccccaggcagcctggccccaggcctggggtcagtggggatgtggggtcctggaccctggcactccccatgccctttgctgccccgccccagagccccacgtggctgctgtactcccacccagtggggcgcagggctcggctacacatgggtatccgcctgagccagtccccgctggacccgcgcagctggacagagccctgggtgatctacgagggccccagcggctactccgacctggcgtccatcgggccggcccctgaggggggcctggtttttgcctgcctgtacgagagcggggccaggacctcctatgatgagatttccttttgtacattctccctgcgtgaggtcctggagaacgtgcccgccagccccaaaccgcccaaccttggggacaagcctcgggggtgctgctggccctcc

SEQ ID NO: 15 - DNA, 1143 bp, Salmonella typhimurium
acagtggaaaagtccgtggtgttcaaggccgagggcgagcacttcaccgaccagaaaggcaataccatcgtcggctctggcagcggcggcaccaccaagtactttagaatccccgccatgtgcaccaccagcaagggcaccattgtggtgttcgccgacgccagacacaacaccgccagcgatcagagcttcatcgataccgctgccgccagatctaccgatggcggcaagacctggaacaagaagatcgccatctacaacgaccgcgtgaacagcaagctgagcagagtgatggaccctacctgcatcgtggccaacatccagggcagagaaaccatcctggtcatggtcggaaagtggaacaacaacgataagacctggggcgcctacagagacaaggcccctgataccgattgggacctcgtgctgtacaagagcaccgatgacggcgtgaccttcagcaaggtggaaacaaacatccacgacatcgtgaccaagaacggcaccatctctgccatgctcggcggcgttggatctggcctgcaactgaatgatggcaagctggtgttccccgtgcagatggtccgaacaaagaatatcaccaccgtgctgaataccagcttcatctacagcaccgacggcatcacatggtccctgcctagcggctactgtgaaggctttggcagcgagaacaacatcatcgagttcaacgccagcctggtcaacaacatccggaacagcggcctgcggagaagcttcgagacaaaggacttcggaaagacgtggaccgagtttcctccaatggacaagaaggtggacaaccggaaccacggcgtgcagggcagcacaatcacaatccctagcggcaacaaactggtggccgctcactctagcgcccagaacaagaacaacgactacaccagaagcgacatcagcctgtacgcccacaacctgtacagcggcgaagtgaagctgatcgacgacttctaccccaaagtgggcaatgccagcggagccggctacagctgtctgagctaccggaaaaatgtggacaaagaaaccctgtacgtggtgtacgaggccaacggcagcatcgagtttcaggacctgagcagacatctgcccgtgatcaagagctacaac

SEQ ID NO: 16 - DNA, 2424 bp, Vibrio cholera
ttgtcaatcaagatgacttcacaacgaagaagagcatcgattcacaaggaaacagattctaatataaagggagtagatatgcgtttcaaaaacgtaaagaaaaccgctttaatgcttgcaatgttcggtatggcgacaagctcaaacgccgcactttttgactataacgcaacgggtgacactgagtttgacagtccagccaaacagggatggatgcaagacaacacgaataatggcagcggcgttttaaccaatgcagatggaatgcccgcttggttggtgcaaggtattggagggagagctcaatggacatattctctctctactaatcaacatgcccaagcatcaagtttcggttggcgaatgacgacagaaatgaaagtgctcagtggtggaatgatcacaaactactacgccaacggcactcagcgtgtcttacccatcatttcattagatagcagtggtaacttagttgttgagtttgaagggcaaactggacgcaccgttttggcaaccggcacagcagcaacggaatatcataaatttgaattggtattccttcctggaagtaacccatccgctagcttttacttcgatggcaaactcattcgtgacaacatccagccgactgcatcaaaacaaaatatgatcgtatgggggaatggctcatcaaatacggatggtgtcgccgcttatcgtgatattaagtttgaaattcaaggcgacgtcatcttcagaggcccagaccgtataccgtccattgtagcaagtagcgtaacaccaggggtggtaaccgcatttgcagagaaacgtgtggggggaggagatcccggtgctctgagtaataccaatgacataatcactcgtacctcacgagatggcggtataacttgggataccgagctcaacctcactgagcaaatcaatgtcagtgatgagtttgatttctccgatcctcggcctatctatgatccttcctccaatacggttcttgtctcttatgctcgatggccgaccgatgccgctcaaaacggagatcgaataaaaccatggatgccaaacggtattttttacagcgtctatgatgttgcatcagggaactggcaagcgcctatcgatgttaccgatcaggtgaaagaacgcagtttccaaatcgctggttggggtggttcagagctgtatcgccgaaataccagcctaaatagccagcaagactggcaatcaaacgctaagatccgaattgttgatggtgcagcgaaccagatacaagttgccgatggtagccgaaaatatgttgtcacactgagtattgatgaatcaggtggtctagtcgctaatctaaacggtgttagtgctccgattatcctgcaatctgaacacgcaaaggtacactctttccatgactacgaacttcaatattcggcgttaaaccacaccacaacgttattcgtggatggtcagcaaatcacaacttgggctggcgaagtatcgcaggagaacaacattcagtttggtaatgcggatgcccaaattgacggcagactgcatgtgcaaaaaattgttctcacacagcaaggccataacctcgtggagtttgatgctttctatttagcacagcaaacccctgaagtagagaaagaccttgaaaagcttggttggacaaaaattaaaacgggcaacaccatgagtttgtatggaaatgccagtgtcaacccaggaccgggtcatggcatcacccttactcgacaacaaaatatcagtggcagccaaaacggccgcttgatctacccagcgattgtgcttgatcgtttcttcttgaacgtcatgtctatttacagtgatgatggcggttcaaactggcaaaccggttcaacactccctatcccctttcgctggaagagttcgagtatcctagaaactctcgaacctagtgaagctgatatggttgaactccaaaacggtgatctactccttactgcacgccttgattttaaccaaatcgttaatggtgtgaactatagcccacgccagcaatttttgagtaaagatggtggaatcacgtggagcctacttgaggctaacaacgctaacgtctttagcaatatcagtactggtaccgttgatgcttctattactcggttcgagcaaagtgacggtagccatttcttactctttactaacccacaaggaaaccctgcggggacaaatggcaggcaaaatctaggcttatggtttagcttcgatgaaggggtgacatggaaaggaccaattcaacttgttaatggtgcatcggcatattctgatatttatcaattggattcggaaaatgcgattgtcattgttgaaacggataattcaaatatgcgaattcttcgtatgcctatcacattgctaaaacagaagctgaccttatcgcaaaactaa

SEQ ID NO: 17 - protein, 6 aa, Mus musculus
MEDLRP

SEQ ID NO: 18 - protein, 5 aa, Mus musculus
EDLRP

SEQ ID NO: 19 - protein, 5 aa, Homo sapiens
MASLP

SEQ ID NO: 20 - protein, 4 aa, Homo sapiens
ASLP

SEQ ID NO: 21 - protein, 8 aa, Salmonella typhimurium
TVEKSVVF

SEQ ID NO: 22 - protein, 12 aa, Homo sapiens
GDYDAPTHQVQW

SEQ ID NO: 23 - protein, 8 aa, Homo sapiens
SMDQGSTW

SEQ ID NO: 24 - protein, 8 aa, Salmonella typhimurium
STDGGKTW

SEQ ID NO: 25 - protein, 8 aa, Homo sapiens
PRPPAPEA

SEQ ID NO: 26 - protein, 8 aa, Homo sapiens
QTPLEAAC

SEQ ID NO: 27 - protein, 9 aa, Homo sapiens
NPRPPAPEA

SEQ ID NO: 28 - protein, 7 aa, Unknown
  Description of Unknown: recombinant mutant human sialidase sequence
SQNDGES

SEQ ID NO: 29 - protein, 232 aa, Artificial Sequence
  Description of Artificial Sequence: Synthetic polypeptide
EPKSCDKTHTCPPCPAPELLGGPSVFLFPPKPKDTLMISRTPEVTCVVVDVSHEDPEVKFNWYVDGVEVHNAKTKPREEQYNSTYRVVSVLTVLHQDWLNGKEYKCKVSNKALPAPIEKTISKAKGQPREPQVYTLPPSREEMTKNQVSLTCLVKGFYPSDIAVEWESNGQPENNYKTTPPVLDSDGSFFLYSKLTVDKSRWQQGNVFSCSVMHEALHNHYTQKSLSLSPGK

SEQ ID NO: 30 - protein, 227 aa, Artificial Sequence
  Description of Artificial Sequence: Synthetic polypeptide
DKTHTCPPCPAPELLGGPSVFLFPPKPKDTLMISRTPEVTCVVVDVSHEDPEVKFNWYVDGVEVHNAKTKPREEQYNSTYRVVSVLTVLHQDWLNGKEYKCKVSNKALPAPIEKTISKAKGQPREPQVYTLPPSREEMTKNQVSLTCLVKGFYPSDIAVEWESNGQPENNYKTTPPVLDSDGSFFLTSKLTVDKSRWQQGNVFSCSVMHEALHNHYTQKSLSLSPGK

SEQ ID NO: 31 - protein, 232 aa, Artificial Sequence
  Description of Artificial Sequence: Synthetic polypeptide
EPKSCDKTHTCPPCPAPELLGGPSVFLFPPKPKDTLMISRTPEVTCVVVDVSHEDPEVKFNWYVDGVEVHNAKTKPREEQYNSTYRVVSVLTVLHQDWLNGKEYKCKVSNKALPAPIEKTISKAKGQPREPQVYTLPPSREEMTKNQVSLYCLVKGFYPSDIAVEWESNGQPENNYKTTPPVLDSDGSFFLYSKLTVDKSRWQQGNVFSCSVMHEALHNHYTQKSLSLSPGK

SEQ ID NO: 32 - protein, 22 aa, Unknown
  Description of Unknown: recombinant mutant human sialidase sequence
MDMRVPAQLLGLLLLWLPGARC

SEQ ID NO: 33 - protein, 4 aa, Homo sapiens
YGTL

SEQ ID NO: 34 - protein, 409 aa, Mus musculus
MVGADPTRPRGPLSYWAGRRGQGLAAIFLLLVSAAESEARAEDDFSLVQPLVTMEQLLWVSGKQIGSVDTFRIPLITATPRGTLLAFAEARKKSASDEGAKFIAMRRSTDQGSTWSSTAFIVDDGEASDGLNLGAVVNDVDTGIVFLIYTLCAHKVNCQVASTMLVWSKDDGISWSPPRNLSVDIGTEMFAPGPGSGIQKQREPGKGRLIVCGHGTLERDGVFCLLSDDHGASWHYGTGVSGIPFGQPKHDHDFNPDECQPYELPDGSVIINARNQNNYHCRCRIVLRSYDACDTLRPRDVTFDPELVDPVVAAGALATSSGIVFFSNPAHPEFRVNLTLRWSFSNGTSWLKERVQVWPGPSGYSSLTALENSTDGKKQPPQLFVLYEKGLNRYTESISMVKISVYGTL

SEQ ID NO: 35 - protein, 393 aa, Mus musculus
MTVQPSPWFSDLRPMATCPVLQKETLFRTGVHAYRIPALLYLKKQKTLLAFAEKRASKTDEHAELIVLRRGSYNEATNRVKWQPEEVVTQAQLEGHRSMNPCPLYDKQTKTLFLFFIAVPGRVSEHHQLHTKVNVTRLCCVSSTDHGRTWSPIQDLTETTIGSTHQEWATFAVGPGHCLQLRNPAGSLLVPAYAYRKLHPAQKPTPFAFCFISLDHGHTWKLGNFVAENSLECQVAEVGTGAQRMVYLNARSFLGARVQAQSPNDGLDFQDNRVVSKLVEPPHGCHGSVVAFHNPISKPHALDTWLLYTHPTDSRNRTNLGVYLNQMPLDPTAWSEPTLLAMGICAYSDLQNMGQGPDGSPQFGCLYESGNYEEIIFLIFTLKQAFPTVFDAQ

SEQ ID NO: 36 - protein, 379 aa, Artificial Sequence
  Description of Artificial Sequence: Synthetic polypeptide
ASLPYLQKESVFQSGAHAYRIPALLYLPGQQSLLAFAEQRASKKDEHAELIVLRRGDYDAPTHQVQWQAQEVVAQARLDGHRSMNPCPLYDAQTGTLFLFFIAIPGQVTEQQQLQTRANVTRLCQVTSTDHGRTWSSPRDLTDAAIGPAYREWSTFAVGPGHCLQLHDRARSLVVPAYAYRKLHPKQRPIPSAFCFLSHDHGRTWARGHFVAQDTLECQVAEVETGEQRVVTLNARSHLRARVQAQSTNDGLDFQESQLVKKLVEPPPQGCQGSVISFPSPRSGPGSPAQWLLYTHPTHSWQRADLGAYLNPRPPAPEAWSEPVLLAKGSCAYSDLQSMGTGPDGSPLFGCLYEANDYEEIVFLMFTLKQAFPAEYLPQ

SEQ ID NO: 37 - protein, 379 aa, Artificial Sequence
  Description of Artificial Sequence: Synthetic polypeptide
ASLPYLQKESVFQSGAHAYRIPALLYLPGQQSLLAFAEQRASKKDEHAELIVLRRGDYDAPTHQVQWQAQEVVAQARLDGHRSMNPCPLYDAQTGTLFLFFIAIPGQVTEQQQLQTRANVTRLCQVTSTDHGRTWSSPRDLTDAAIGPAYREWSTFAVGPGHCLQLHDRARSLVVPAYAYRKLHPKQRPIPSAFCFLSHDHGRTWARGHFVAQDTLECQVAEVETGEQRVVTLNARSHLRARVQAQSTNDGLDFQESQLVKKLVEPPPQGCQGSVISFPSPRSGPGSPAQWLLYTHPTHSWQRADLGAYLNPRPPAPEAWSEPVLLAKGSAAYSDLQSMGTGPDGSPLFGCLYEANDYEEIVFLMFTLKQAFPAEYLPQ

SEQ ID NO: 38 - protein, 380 aa, Artificial Sequence
  Description of Artificial Sequence: Synthetic polypeptide
AASLPYLQKESVFQSGAHAYRIPALLYLPGQQSLLAFAEQRASKKDEHAELIVLRRGDYDAPTHQVQWQAQEVVAQARLDGHRSMNPCPLYDAQTGTLFLFFIAIPGQVTEQQQLQTRANVTRLCQVTSTDHGRTWSSPRDLTDAAIGPAYREWSTFAVGPGHCLQLHDRARSLVVPAYAYRKLHPKQRPIPSAFCFLSHDHGRTWARGHFVAQDTLECQVAEVETGEQRVVTLNARSHLRARVQAQSTNDGLDFQESQLVKKLVEPPPQGCQGSVISFPSPRSGPGSPAQWLLYTHPTHSWQRADLGAYLNPRPPAPEAWSEPVLLAKGSAAYSDLQSMGTGPDGSPLFGCLYEANDYEEIVFLMFTLKQAFPAEYLPQ

SEQ ID NO: 39 - protein, 380 aa, Artificial Sequence
  Description of Artificial Sequence: Synthetic polypeptide
DASLPYLQKESVFQSGAHAYRIPALLYLPGQQSLLAFAEQRASKKDEHAELIVLRRGDYDAPTHQVQWQAQEVVAQARLDGHRSMNPCPLYDAQTGTLFLFFIAIPGQVTEQQQLQTRANVTRLCQVTSTDHGRTWSSPRDLTDAAIGPAYREWSTFAVGPGHCLQLHDRARSLVVPAYAYRKLHPKQRPIPSAFCFLSHDHGRTWARGHFVAQDTLECQVAEVETGEQRVVTLNARSHLRARVQAQSTNDGLDFQESQLVKKLVEPPPQGCQGSVISFPSPRSGPGSPAQWLLYTHPTHSWQRADLGAYLNPRPPAPEAWSEPVLLAKGSAAYSDLQSMGTGPDGSPLFGCLYEANDYEEIVFLMFTLKQAFPAEYLPQ

SEQ ID NO: 40 - protein, 450 aa, Artificial Sequence
  Description of Artificial Sequence: Synthetic polypeptide
EVQLVESGGGLVQPGGSLRLSCAASGFNIKDTYIHWVRQAPGKGLEWVARIYPTNGYTRYADSVKGRFTISADTSKNTAYLQMNSLRAEDTAVYYCSRWGGDGFYAMDYWGQGTLVTVSSASTKGPSVFPLAPSSKSTSGGTAALGCLVKDYFPEPVTVSWNSGALTSGVHTFPAVLQSSGLYSLSSVVTVPSSSLGTQTYICNVNHKPSNTKVDKKVEPKSCDKTHTCPPCPAPELLGGPSVFLFPPKPKDTLMISRTPEVTCVVVDVSHEDPEVKFNWYVDGVEVHNAKTKPREEQYNSTYRVVSVLTVLHQDWLNGKEYKCKVSNKALPAPIEKTISKAKGQPREPQVYTLPPSREEMTKNQVSLYCLVKGFYPSDIAVEWESNGQPENNYKTTPPVLDSDGSFFLYSKLTVDKSRWQQGNVFSCSVMHEALHNHYTQKSLSLSPGK

SEQ ID NO: 41 - protein, 213 aa, Artificial Sequence
  Description of Artificial Sequence: Synthetic polypeptide
DIQMTQSPSSLSASVGDRVTITCRASQDVNTAVAWYQQKPGKAPKLLIYSASFLYSGVPSRFSGSRSGTDFTLTISSLQPEDFATYYCQQHYTTPPTFGQGTKVEIKRTVAPSVFIFPPSDEQLKSGTASVVCLLNNFYPREAKVQWKVDNALQSGNSQESVTEQDSKDSTYSLSSTLTLSKADYEKHKVYACEVTHQGLSSPVTKSFNRGEC

SEQ ID NO: 42 - protein, 242 aa, Artificial Sequence
  Description of Artificial Sequence: Synthetic polypeptide
EVQLVESGGGLVQPGGSLRLSCAASGFNIKDTYIHWVRQAPGKGLEWVARIYPTNGYTRYADSVKGRFTISADTSKNTAYLQMNSLRAEDTAVYYCSRWGGDGFYAMDYWGQGTLVTVSSGGGGSGGGGSGGGGSDIQMTQSPSSLSASVGDRVTITCRASQDVNTAVAWYQQKPGKAPKLLIYSASFLYSGVPSRFSGSRSGTDFTLTISSLQPEDFATYYCQQHYTTPPTFGQGTKVEIK

SEQ ID NO: 43 - protein, 873 aa, Artificial Sequence
  Description of Artificial Sequence: Synthetic polypeptide
ASLPYLQKESVFQSGAHAYRIPALLYLPGQQSLLAFAEQRASKKDEHAELIVLRRGDYDAPTHQVQWQAQEVVAQARLDGHRSMNPCPLYDAQTGTLFLFFIAIPGQVTEQQQLQTRANVTRLCQVTSTDHGRTWSSPRDLTDAAIGPAYREWSTFAVGPGHCLQLHDRARSLVVPAYAYRKLHPKQRPIPSAFCFLSHDHGRTWARGHFVAQDTLECQVAEVETGEQRVVTLNARSHLRARVQAQSTNDGLDFQESQLVKKLVEPPPQGCQGSVISFPSPRSGPGSPAQWLLYTHPTHSWQRADLGAYLNPRPPAPEAWSEPVLLAKGSCAYSDLQSMGTGPDGSPLFGCLYEANDYEEIVFLMFTLKQAFPAEYLPQGGGGSGGGGSDKTHTCPPCPAPELLGGPSVFLFPPKPKDTLMISRTPEVTCVVVDVSHEDPEVKFNWYVDGVEVHNAKTKPREEQYNSTYRVVSVLTVLHQDWLNGKEYKCKVSNKALPAPIEKTISKAKGQPREPQVYTLPPSREEMTKNQVSLTCLVKGFYPSDIAVEWESNGQPENNYKTTPPVLDSDGSFFLYSKLTVDKSRWQQGNVFSCSVMHEALHNHYTQKSLSLSPGKGGGGSGGGGSGGGGSEVQLVESGGGLVQPGGSLRLSCAASGFNIKDTYIHWVRQAPGKGLEWVARIYPTNGYTRYADSVKGRFTISADTSKNTAYLQMNSLRAEDTAVYYCSRWGGDGFYAMDYWGQGTLVTVSSGGGGSGGGGSGGGGSDIQMTQSPSSLSASVGDRVTITCRASQDVNTAVAWYQQKPGKAPKLLIYSASFLYSGVPSRFSGSRSGTDFTLTISSLQPEDFATYYCQQHYTTPPTFGQGTKVEIK

SEQ ID NO: 44 - protein, 873 aa, Artificial Sequence
  Description of Artificial Sequence: Synthetic polypeptide
ASLPYLQKESVFQSGAHAYRIPALLYLPGQQSLLAFAEQRASKKDEHAELIVLRRGDYDAPTHQVQWQAQEVVAQARLDGHRSMNPCPLYDAQTGTLFLFFIAIPGQVTEQQQLQTRANVTRLCQVTSTDHGRTWSSPRDLTDAAIGPAYREWSTFAVGPGHCLQLHDRARSLVVPAYAYRKLHPKQRPIPSAFCFLSHDHGRTWARGHFVAQDTLECQVAEVETGEQRVVTLNARSHLRARVQAQSTNDGLDFQESQLVKKLVEPPPQGCQGSVISFPSPRSGPGSPAQWLLYTHPTHSWQRADLGAYLNPRPPAPEAWSEPVLLAKGSAAYSDLQSMGTGPDGSPLFGCLYEANDYEEIVFLMFTLKQAFPAEYLPQGGGGSGGGGSDKTHTCPPCPAPELLGGPSVFLFPPKPKDTLMISRTPEVTCVVVDVSHEDPEVKFNWYVDGVEVHNAKTKPREEQYNSTYRVVSVLTVLHQDWLNGKEYKCKVSNKALPAPIEKTISKAKGQPREPQVYTLPPSREEMTKNQVSLTCLVKGFYPSDIAVEWESNGQPENNYKTTPPVLDSDGSFFLYSKLTVDKSRWQQGNVFSCSVMHEALHNHYTQKSLSLSPGKGGGGSGGGGSGGGGSEVQLVESGGGLVQPGGSLRLSCAASGFNIKDTYIHWVRQAPGKGLEWVARIYPTNGYTRYADSVKGRFTISADTSKNTAYLQMNSLRAEDTAVYYCSRWGGDGFYAMDYWGQGTLVTVSSGGGGSGGGGSGGGGSDIQMTQSPSSLSASVGDRVTITCRASQDVNTAVAWYQQKPGKAPKLLIYSASFLYSGVPSRFSGSRSGTDFTLTISSLQPEDFATYYCQQHYTTPPTFGQGTKVEIK

SEQ ID NO: 45 - protein, 874 aa, Artificial Sequence
  Description of Artificial Sequence: Synthetic polypeptide
AASLPYLQKESVFQSGAHAYRIPALLYLPGQQSLLAFAEQRASKKDEHAELIVLRRGDYDAPTHQVQWQAQEVVAQARLDGHRSMNPCPLYDAQTGTLFLFFIAIPGQVTEQQQLQTRANVTRLCQVTSTDHGRTWSSPRDLTDAAIGPAYREWSTFAVGPGHCLQLHDRARSLVVPAYAYRKLHPKQRPIPSAFCFLSHDHGRTWARGHFVAQDTLECQVAEVETGEQRVVTLNARSHLRARVQAQSTNDGLDFQESQLVKKLVEPPPQGCQGSVISFPSPRSGPGSPAQWLLYTHPTHSWQRADLGAYLNPRPPAPEAWSEPVLLAKGSCAYSDLQSMGTGPDGSPLFGCLYEANDYEEIVFLMFTLKQAFPAEYLPQGGGGSGGGGSDKTHTCPPCPAPELLGGPSVFLFPPKPKDTLMISRTPEVTCVVVDVSHEDPEVKFNWYVDGVEVHNAKTKPREEQYNSTYRVVSVLTVLHQDWLNGKEYKCKVSNKALPAPIEKTISKAKGQPREPQVYTLPPSREEMTKNQVSLTCLVKGFYPSDIAVEWESNGQPENNYKTTPPVLDSDGSFFLYSKLTVDKSRWQQGNVFSCSVMHEALHNHYTQKSLSLSPGKGGGGSGGGGSGGGGSEVQLVESGGGLVQPGGSLRLSCAASGFNIKDTYIHWVRQAPGKGLEWVARIYPTNGYTRYADSVKGRFTISADTSKNTAYLQMNSLRAEDTAVYYCSRWGGDGFYAMDYWGQGTLVTVSSGGGGSGGGGSGGGGSDIQMTQSPSSLSASVGDRVTITCRASQDVNTAVAWYQQKPGKAPKLLIYSASFLYSGVPSRFSGSRSGTDFTLTISSLQPEDFATYYCQQHYTTPPTFGQGTKVEIK

SEQ ID NO: 46 - protein, 874 aa, Artificial Sequence
  Description of Artificial Sequence: Synthetic polypeptide
DASLPYLQKESVFQSGAHAYRIPALLYLPGQQSLLAFAEQRASKKDEHAELIVLRRGDYDAPTHQVQWQAQEVVAQARLDGHRSMNPCPLYDAQTGTLFLFFIAIPGQVTEQQQLQTRANVTRLCQVTSTDHGRTWSSPRDLTDAAIGPAYREWSTFAVGPGHCLQLHDRARSLVVPAYAYRKLHPKQRPIPSAFCFLSHDHGRTWARGHFVAQDTLECQVAEVETGEQRVVTLNARSHLRARVQAQSTNDGLDFQESQLVKKLVEPPPQGCQGSVISFPSPRSGPGSPAQWLLYTHPTHSWQRADLGAYLNPRPPAPEAWSEPVLLAKGSCAYSDLQSMGTGPDGSPLFGCLYEANDYEEIVFLMFTLKQAFPAEYLPQGGGGSGGGGSDKTHTCPPCPAPELLGGPSVFLFPPKPKDTLMISRTPEVTCVVVDVSHEDPEVKFNWYVDGVEVHNAKTKPREEQYNSTYRVVSVLTVLHQDWLNGKEYKCKVSNKALPAPIEKTISKAKGQPREPQVYTLPPSREEMTKNQVSLTCLVKGFYPSDIAVEWESNGQPENNYKTTPPVLDSDGSFFLYSKLTVDKSRWQQGNVFSCSVMHEALHNHYTQKSLSLSPGKGGGGSGGGGSGGGGSEVQLVESGGGLVQPGGSLRLSCAASGFNIKDTYIHWVRQAPGKGLEWVARIYPTNGYTRYADSVKGRFTISADTSKNTAYLQMNSLRAEDTAVYYCSRWGGDGFYAMDYWGQGTLVTVSSGGGGSGGGGSGGGGSDIQMTQSPSSLSASVGDRVTITCRASQDVNTAVAWYQQKPGKAPKLLIYSASFLYSGVPSRFSGSRSGTDFTLTISSLQPEDFATYYCQQHYTTPPTFGQGTKVEIK

SEQ ID NO: 47 - protein, 874 aa, Artificial Sequence
  Description of Artificial Sequence: Synthetic polypeptide
AASLPYLQKESVFQSGAHAYRIPALLYLPGQQSLLAFAEQRASKKDEHAELIVLRRGDYDAPTHQVQWQAQEVVAQARLDGHRSMNPCPLYDAQTGTLFLFFIAIPGQVTEQQQLQTRANVTRLCQVTSTDHGRTWSSPRDLTDAAIGPAYREWSTFAVGPGHCLQLHDRARSLVVPAYAYRKLHPKQRPIPSAFCFLSHDHGRTWARGHFVAQDTLECQVAEVETGEQRVVTLNARSHLRARVQAQSTNDGLDFQESQLVKKLVEPPPQGCQGSVISFPSPRSGPGSPAQWLLYTHPTHSWQRADLGAYLNPRPPAPEAWSEPVLLAKGSAAYSDLQSMGTGPDGSPLFGCLYEANDYEEIVFLMFTLKQAFPAEYLPQGGGGSGGGGSDKTHTCPPCPAPELLGGPSVFLFPPKPKDTLMISRTPEVTCVVVDVSHEDPEVKFNWYVDGVEVHNAKTKPREEQYNSTYRVVSVLTVLHQDWLNGKEYKCKVSNKALPAPIEKTISKAKGQPREPQVYTLPPSREEMTKNQVSLTCLVKGFYPSDIAVEWESNGQPENNYKTTPPVLDSDGSFFLYSKLTVDKSRWQQGNVFSCSVMHEALHNHYTQKSLSLSPGKGGGGSGGGGSGGGGSEVQLVESGGGLVQPGGSLRLSCAASGFNIKDTYIHWVRQAPGKGLEWVARIYPTNGYTRYADSVKGRFTISADTSKNTAYLQMNSLRAEDTAVYYCSRWGGDGFYAMDYWGQGTLVTVSSGGGGSGGGGSGGGGSDIQMTQSPSSLSASVGDRVTITCRASQDVNTAVAWYQQKPGKAPKLLIYSASFLYSGVPSRFSGSRSGTDFTLTISSLQPEDFATYYCQQHYTTPPTFGQGTKVEIK

SEQ ID NO: 48 - protein, 874 aa, Artificial Sequence
  Description of Artificial Sequence: Synthetic polypeptide
DASLPYLQKESVFQSGAHAYRIPALLYLPGQQSLLAFAEQRASKKDEHAELIVLRRGDYDAPTHQVQWQAQEVVAQARLDGHRSMNPCPLYDAQTGTLFLFFIAIPGQVTEQQQLQTRANVTRLCQVTSTDHGRTWSSPRDLTDAAIGPAYREWSTFAVGPGHCLQLHDRARSLVVPAYAYRKLHPKQRPIPSAFCFLSHDHGRTWARGHFVAQDTLECQVAEVETGEQRVVTLNARSHLRARVQAQSTNDGLDFQESQLVKKLVEPPPQGCQGSVISFPSPRSGPGSPAQWLLYTHPTHSWQRADLGAYLNPRPPAPEAWSEPVLLAKGSAAYSDLQSMGTGPDGSPLFGCLYEANDYEEIVFLMFTLKQAFPAEYLPQGGGGSGGGGSDKTHTCPPCPAPELLGGPSVFLFPPKPKDTLMISRTPEVTCVVVDVSHEDPEVKFNWYVDGVEVHNAKTKPREEQYNSTYRVVSVLTVLHQDWLNGKEYKCKVSNKALPAPIEKTISKAKGQPREPQVYTLPPSREEMTKNQVSLTCLVKGFYPSDIAVEWESNGQPENNYKTTPPVLDSDGSFFLYSKLTVDKSRWQQGNVFSCSVMHEALHNHYTQKSLSLSPGKGGGGSGGGGSGGGGSEVQLVESGGGLVQPGGSLRLSCAASGFNIKDTYIHWVRQAPGKGLEWVARIYPTNGYTRYADSVKGRFTISADTSKNTAYLQMNSLRAEDTAVYYCSRWGGDGFYAMDYWGQGTLVTVSSGGGGSGGGGSGGGGSDIQMTQSPSSLSASVGDRVTITCRASQDVNTAVAWYQQKPGKAPKLLIYSASFLYSGVPSRFSGSRSGTDFTLTISSLQPEDFATYYCQQHYTTPPTFGQGTKVEIK

SEQ ID NO: 49 - protein, 213 aa, Artificial Sequence; identical to SEQ ID NO: 41
  Description of Artificial Sequence: Synthetic polypeptide

SEQ ID NO: 50 - protein, 450 aa, Artificial Sequence; identical to SEQ ID NO: 40
  Description of Artificial Sequence: Synthetic polypeptide

SEQ ID NO: 51 - protein, 616 aa, Artificial Sequence
  Description of Artificial Sequence: Synthetic polypeptide
ASLPYLQKESVFQSGAHAYRIPALLYLPGQQSLLAFAEQRASKKDEHAELIVLRRGDYDAPTHQVQWQAQEVVAQARLDGHRSMNPCPLYDAQTGTLFLFFIAIPGQVTEQQQLQTRANVTRLCQVTSTDHGRTWSSPRDLTDAAIGPAYREWSTFAVGPGHCLQLHDRARSLVVPAYAYRKLHPKQRPIPSAFCFLSHDHGRTWARGHFVAQDTLECQVAEVETGEQRVVTLNARSHLRARVQAQSTNDGLDFQESQLVKKLVEPPPQGCQGSVISFPSPRSGPGSPAQWLLYTHPTHSWQRADLGAYLNPRPPAPEAWSEPVLLAKGSCAYSDLQSMGTGPDGSPLFGCLYEANDYEEIVFLMFTLKQAFPAEYLPQGGGGSGGGGSDKTHTCPPCPAPELLGGPSVFLFPPKPKDTLMISRTPEVTCVVVDVSHEDPEVKFNWYVDGVEVHNAKTKPREEQYNSTYRVVSVLTVLHQDWLNGKEYKCKVSNKALPAPIEKTISKAKGQPREPQVYTLPPSREEMTKNQVSLTCLVKGFYPSDIAVEWESNGQPENNYKTTPPVLDSDGSFFLTSKLTVDKSRWQQGNVFSCSVMHEALHNHYTQKSLSLSPGK

SEQ ID NO: 52 - protein, 616 aa, Artificial Sequence
  Description of Artificial Sequence: Synthetic polypeptide
ASLPYLQKESVFQSGAHAYRIPALLYLPGQQSLLAFAEQRASKKDEHAELIVLRRGDYDAPTHQVQWQAQEVVAQARLDGHRSMNPCPLYDAQTGTLFLFFIAIPGQVTEQQQLQTRANVTRLCQVTSTDHGRTWSSPRDLTDAAIGPAYREWSTFAVGPGHCLQLHDRARSLVVPAYAYRKLHPKQRPIPSAFCFLSHDHGRTWARGHFVAQDTLECQVAEVETGEQRVVTLNARSHLRARVQAQSTNDGLDFQESQLVKKLVEPPPQGCQGSVISFPSPRSGPGSPAQWLLYTHPTHSWQRADLGAYLNPRPPAPEAWSEPVLLAKGSAAYSDLQSMGTGPDGSPLFGCLYEANDYEEIVFLMFTLKQAFPAEYLPQGGGGSGGGGSDKTHTCPPCPAPELLGGPSVFLFPPKPKDTLMISRTPEVTCVVVDVSHEDPEVKFNWYVDGVEVHNAKTKPREEQYNSTYRVVSVLTVLHQDWLNGKEYKCKVSNKALPAPIEKTISKAKGQPREPQVYTLPPSREEMTKNQVSLTCLVKGFYPSDIAVEWESNGQPENNYKTTPPVLDSDGSFFLTSKLTVDKSRWQQGNVFSCSVMHEALHNHYTQKSLSLSPGK

SEQ ID NO: 53 - protein, 617 aa, Artificial Sequence
  Description of Artificial Sequence: Synthetic polypeptide
AASLPYLQKESVFQSGAHAYRIPALLYLPGQQSLLAFAEQRASKKDEHAELIVLRRGDYDAPTHQVQWQAQEVVAQARLDGHRSMNPCPLYDAQTGTLFLFFIAIPGQVTEQQQLQTRANVTRLCQVTSTDHGRTWSSPRDLTDAAIGPAYREWSTFAVGPGHCLQLHDRARSLVVPAYAYRKLHPKQRPIPSAFCFLSHDHGRTWARGHFVAQDTLECQVAEVETGEQRVVTLNARSHLRARVQAQSTNDGLDFQESQLVKKLVEPPPQGCQGSVISFPSPRSGPGSPAQWLLYTHPTHSWQRADLGAYLNPRPPAPEAWSEPVLLAKGSAAYSDLQSMGTGPDGSPLFGCLYEANDYEEIVFLMFTLKQAFPAEYLPQGGGGSGGGGSDKTHTCPPCPAPELLGGPSVFLFPPKPKDTLMISRTPEVTCVVVDVSHEDPEVKFNWYVDGVEVHNAKTKPREEQYNSTYRVVSVLTVLHQDWLNGKEYKCKVSNKALPAPIEKTISKAKGQPREPQVYTLPPSREEMTKNQVSLTCLVKGFYPSDIAVEWESNGQPENNYKTTPPVLDSDGSFFLTSKLTVDKSRWQQGNVFSCSVMHEALHNHYTQKSLSLSPGK

SEQ ID NO: 54 - protein, 617 aa, Artificial Sequence
  Description of Artificial Sequence: Synthetic polypeptide
DASLPYLQKESVFQSGAHAYRIPALLYLPGQQSLLAFAEQRASKKDEHAELIVLRRGDYDAPTHQVQWQAQEVVAQARLDGHRSMNPCPLYDAQTGTLFLFFIAIPGQVTEQQQLQTRANVTRLCQVTSTDHGRTWSSPRDLTDAAIGPAYREWSTFAVGPGHCLQLHDRARSLVVPAYAYRKLHPKQRPIPSAFCFLSHDHGRTWARGHFVAQDTLECQVAEVETGEQRVVTLNARSHLRARVQAQSTNDGLDFQESQLVKKLVEPPPQGCQGSVISFPSPRSGPGSPAQWLLYTHPTHSWQRADLGAYLNPRPPAPEAWSEPVLLAKGSAAYSDLQSMGTGPDGSPLFGCLYEANDYEEIVFLMFTLKQAFPAEYLPQGGGGSGGGGSDKTHTCPPCPAPELLGGPSVFLFPPKPKDTLMISRTPEVTCVVVDVSHEDPEVKFNWYVDGVEVHNAKTKPREEQYNSTYRVVSVLTVLHQDWLNGKEYKCKVSNKALPAPIEKTISKAKGQPREPQVYTLPPSREEMTKNQVSLTCLVKGFYPSDIAVEWESNGQPENNYKTTPPVLDSDGSFFLTSKLTVDKSRWQQGNVFSCSVMHEALHNHYTQKSLSLSPGK

SEQ ID NO: 55 - DNA, 2619 bp, Artificial Sequence
  Description of Artificial Sequence: Synthetic polynucleotide
gcatctctgccttacctgcagaaagaaagcgtgttccagtctggcgcccacgcctacagaattcccgctctgctgtatctgccaggccagcagtctctgctggctttcgctgaacagcgggccagcaagaaggatgagcacgccgaactgatcgtgctgcggagaggcgattacgacgcccctacacatcaggtgcagtggcaggctcaagaggtggtggctcaggctagactggacggccacagatctatgaacccctgtcctctgtacgatgcccagaccggcacactgtttctgttctttatcgctatccccggccaagtgaccgagcagcagcagctgcagacaagagccaacgtgaccagactgtgtcaagtgacctccaccgaccacggcagaacctggtctagccctagagatctgaccgacgccgccatcggacctgcctatagagagtggtccaccttcgccgttggacctggacactgtctccagctgcacgacagggctagatctctggtggtgcctgcctacgcctatagaaagctgcaccccaaacagcggcctattcctagcgccttctgctttctgagccacgatcacggcaggacatgggccagaggacatttcgtggcccaggacacactggaatgccaggtggccgaagtggaaaccggcgagcagagagtcgtgaccctgaacgccagatctcacctgagagccagagtgcaggcccagagcacaaacgacggcctggatttccaagagagccagctggtcaagaaactggtggaacctcctccacagggctgtcagggaagcgtgatcagctttccatctcctagaagcggccctggctctcctgctcagtggctgctgtatacacaccccacacacagctggcagagagccgatctgggcgcctacctgaatcctagacctcctgctcctgaggcttggagcgaacctgttctgctggccaagggcagctgtgcctacagcgatctgcagtctatgggcacaggccctgatggcagccctctgtttggctgtctgtacgaggccaacgactacgaagagatcgtgttcctgatgttcaccctgaagcaggcctttccagccgagtacctgcctcaaggcggaggtggaagtggcggaggcggatccgacaaaactcacacatgcccaccgtgcccagcacctgaactcctggggggaccgtcagtcttcctcttccccccaaaacccaaggacaccctcatgatctcccggacccctgaggtcacatgcgtggtggtggacgtgagccacgaagaccctgaggtcaagttcaactggtacgtggacggcgtggaggtgcataatgccaagacaaagccgcgggaggagcagtacaacagcacgtaccgtgtggtcagcgtcctcaccgtcctgcaccaggactggctgaatggcaaggagtacaagtgcaaggtctccaacaaagccctcccagcccccatcgagaaaaccatctccaaagccaaagggcagccccgagaaccacaggtctacaccctgcccccatcccgggaggagatgaccaagaaccaggtcagcctgacctgcctggtcaaaggcttctatcccagcgacatcgccgtggagtgggagagcaatgggcagccggagaacaactacaagaccacgcctcccgtgctggactccgacggctccttcttcctctatagcaagctcaccgtggacaagagcaggtggcagcaggggaacgtcttctcatgctccgtgatgcatgaggctctgcacaaccactacacgcagaagagcctctccctgtctccgggtaaaggaggcggaggatctggcggaggtggaagtggcggaggcggatctgaggtgcagctggttgaatctggcggaggactggttcagcctggcggatctctgagactgtcttgtgccgccagcggcttcaacatcaaggacacctacatccactgggtccgacaggcccctggcaaaggacttgaatgggtcgccagaatctaccccaccaacggctacaccagatacgccgactctgtgaagggcagattcaccatcagcgccgacaccagcaagaacaccgcctacctgcagatgaacagcctgagagccgaggacaccgccgtgtactactgttctagatggggaggcgacggcttctacgccatggattattggggccagggcaccctggtcaccgtttcttctggcggaggaggatctggcggaggcggaagtggcggaggcggatctgacatccagatgacacagagccctagcagcctgtctgccagcgtgggagacagagtgaccatcacctgtagagccagccaggacgtgaacacagccgtggcttggtatcagcagaagcctggcaaggcccctaagctgctgatctacagcgccagctttctgtactccggcgtgcccagcagattcagcggctctagaagcggcaccgacttcaccctgaccataagcagtctgcagcccgaggacttcgccacctactactgtcagcagcactacaccacacctccaacctttggccagggcaccaaggtggaaatcaag

SEQ ID NO: 56 - protein, 418 aa, Mus musculus
MEEVPPYSLSSTLFQQEEQSGVTYRIPALLYLPPTHTFLAFAEKRTSVRDEDAACLVLRRGLMKGRSVQWGPQRLLMEATLPGHRTMNPCPVWEKNTGRVYLFFICVRGHVTERCQIVWGKNAARLCFLCSEDAGCSWGEVKDLTEEVIGSEVKRWATFAVGPGHGIQLHSGRLIIPAYAYYVSRWFLCFACSVKPHSLMIYSDDFGVTWHHGKFIEPQVTGECQVAEVAGTAGNPVLYCSARTPSRFRAEAFSTDSGGCFQKPTLNPQLHEPRTGCQGSVVSFRPLKMPNTYQDSIGKGAPATQKCPLLDSPLEVEKGAETPSATWLLYSHPTSKRKRINLGIYYNRNPLEVNCWSRPWILNRGPSGYSDLAVVEEQDLVACLFECGEKNEYERIDFCLFSDHEVLSCEDCTSPSSD

SEQ ID NO: 57 - protein, 501 aa, Mus musculus
METAGAPFCFHVDSLVPCSYWKVMGPTRVPRRTVLFQRERTGLTYRVPALLCVPPRPTLLAFAEQRLSPDDSHAHRLVLRRGTLTRGSVRWGTLSVLETAVLEEHRSMNPCPVLDEHSGTIFLFFIAVLGHTPEAVQIATGKNAARLCCVTSCDAGLTWGSVRDLTEEAIGAALQDWATFAVGPGHGVQLRSGRLLVPAYTYHVDRRECFGKICWTSPHSLAFYSDDHGISWHCGGLVPNLRSGECQLAAVDGDFLYCNARSPLGNRVQALSADEGTSFLPGELVPTLAETARGCQGSIVGFLAPPSIEPQDDRWTGSPRNTPHSPCFNLRVQESSGEGARGLLERWMPRLPLCYPQSRSPENHGLEPGSDGDKTSWTPECPMSSDSMLQSPTWLLYSHPAGRRARLHMGIYLSRSPLDPHSWTEPWVIYEGPSGYSDLAFLGPMPGASLVFACLFESGTRTSYEDISFCLFSLADVLENVPTGLEMLSLRDKAQGHCWPS

SEQ ID NO: 58 - DNA, 3850 bp, Mus musculus
gggtcacatgctgatggactaattggagtcgcggcagcgcgggctgcggcccccaaggggaggggtcggagtgacgtgcgcgcttttaaagggccgaggtcagctgacggcttgccaccggtgaccagttcctggacagggatcgccgggagctatggtgggggcagacccgaccagaccccggggaccgctgagctattgggcgggccgtcggggtcaggggctcgcagcgatcttcctgctcctggtgtccgcggcggaatccgaggccagggcagaggatgacttcagcctggtgcagccgctggtgaccatggagcagctgctgtgggtgagcgggaagcagatcggctctgtagacactttccgcatcccgctcatcacagccacccctcggggcacgctcctggccttcgctgaggccaggaaaaaatctgcatccgatgagggggccaagttcatcgccatgaggaggtccacggaccagggtagcacgtggtcctctacagccttcatcgtagacgatggggaggcctccgatggcctgaacctgggcgctgtggtgaacgatgtagacacagggatagtgttccttatctataccctctgtgctcacaaggtcaactgccaggtggcctctaccatgttggtttggagtaaggacgacggcatttcctggagcccaccccggaatctctctgtggatattggcacagagatgtttgcccctggacctggctcaggcattcagaaacagcgggagcctgggaagggccggctcattgtgtgtggacacgggacgctggagcgagatggggtcttctgtctcctcagtgatgaccacggtgcctcctggcactacggcactggagtgagcggcattccctttggccagcccaaacacgatcacgatttcaaccccgacgagtgccagccctacgagcttccagatggctcggtcatcatcaacgcccggaaccagaataactaccattgccgctgcaggatcgtcctccgcagctatgacgcctgtgacaccctcaggccccgggatgtgaccttcgaccctgagctcgtggaccctgtggtagctgcaggagcactagccaccagctccggcattgtcttcttctccaatccagcccaccctgagttccgagtgaacctgaccctgcgctggagtttcagcaatggtacatcctggcagaaggagagggtccaggtgtggccgggacccagcggctactcgtccctgacagccctggaaaacagcacggatggaaagaagcagcccccgcagctgttcgttctgtacgagaaaggcctgaaccggtacaccgagagcatctccatggtcaaaatcagcgtctacggcacgctctgagccccgtgcccaaaggacaccaagtcctggtcgctgacttcacagctctctggaccatctgcagagggtgcctgaaacacagctcttcctctgaactctgaccttttgcaacttctcatcaacagggaagtctcttcgttatgacttaacacccagcttcctctcggggcaggaagtccctccgtcaccaagagcacttttttccagtatgctggggatggcccctgtccattctcttccaggacaacggagctgtgcctttctgggacaggatgggggaggggctccccctggagagatgaacagatacgaactcagggaactgagaaggcccggtgtcctagggtacaaaggcaggtactagatgtgattgctgaaagtccccagggcagagtgtcctttcagagcaaggataagcacacctacgtgtgcacctttgattatttatgaatcgaaatatttgtaacttaaaatttttgatgcagaaaaagcgtttgtggagtctgtggttctgtctgctcacgccttcccaattgcctcctggagagacaggaaggcagctggaagaggagccgatgtacttactgggaagcagaaacccctagattccatcctggctgctgctgtttgcaagtgtcaaagatgggggggcgtgtttatattttatatttctaagatggggtggcataggaaatagggaacagatgtgtaaaaccagatgggaaggacagtctgtgagaaaggagcaagcagttgctgcaggtgtgggagagcaaagcccttctccacgtggaaagagcccagatggacgctaagcatgttgggcacctgtaaccccgcactcgctggactgacggtgtagctcagtggtggagctagtacttggaacgcctaagactctgggttcagtccttgggggggggggtatgtgtttattgagaggaaggtgtacgtactgtaggtcagaggacagcttactggagttgtctctctccttcacgctgtgagtcctgtggaatgacctcaggtgtcagagttgggggcaggtgcctttgccagctgagccatcttgctgtctctgctttaatttaaaaaaaaaaaaaaaaaagaatattaaggtctgagggattcgggctgcgttcatttcaattagagggtcatatttcttttgacatttcttctctaagaaatgttaagatcatttgttctgtgtgatagaggtatagctccattgtatgtcagcagtgagggatcctgtgcattttatccagagtttgtacggtgttctaggggctgctagtgcagcccagtgctaaacacttcagcatgcacaaggcctcaatcagtgcatgcatgtgcacacacacacagacacacacgtacacactgacacaggtacacaaatacacactggcccacatgtacacatcgactcacaggtacacagacccactttgacacacatatacacagacacaaacgcactggcacacacatatacacaggcacacatggatagatggacacacgtgtacacatacacacacacacagaaatacaaatgttcaggttttctaaaaaaaaaaaaattagagacgtgttgacttcatttttagcaaaaatcctgtcatgtatcttaaagtggattgaacccactatgtagcccaggctggcctccaaatgggcatccttctgcctcagtctcccgagggctaggataacaggagtatgccatcacacctggctaatagaaattttcaaaattgtttgtttgaaggtgactcttactatattgcctaactgatctccagttcgtgaaatcctcctgcctcagaaccaggactgtcaatataacccaccaagacaggccaacattcacaattgattgttagtttgtggtctgaatcaaggtcttatactgtagcccaggctagcccggaatacacgatatctccagtgcttcagatcctcagttctaactaagcatggccacatccatgtttaactgcaaatttgatgttaccatggtttggtttggtttggtttggtttggtttggtttggtttggttttttggccattttttttttctcatgctgaggccttgtgctctcaagttggggagacagcatggagggtagctgcaactgtaaccccagttccaggggacctgacaccctctggcctccacaagtattaggcacatctgtggtgcacagacatacaatcaggcaaaatattcatacacataaaataaaataatttaaaacaaaagcaaaaatcaggacctaagaaaaaaatctattcctgattcttttatgttttgtttgtattttatcaagacagggttgtttctctgtatagccctggctgtcttggaattcactctgtagaccaggctggcctcaaactcagaaatcctcctgcctttgccttccaagtgctggaattaaaggcatgcgccacc

SEQ ID NO: 59 - DNA, 1722 bp, Mus musculus
gacatgacccaaacggcccctggctgcaaggtaatatcggaagttgactaagaatggacgccccaccactgactgacccgccccctgagtctgagattggacttgtctctggatacagtcatactttgaggtactacaagttagaaactgttaggttactcagttcagtccatgacagtccaaccttctccatggttttccgatctcaggcccatggcgacctgccctgtcctgcagaaggagacactgttccgcacaggcgtccatgcttacagaatccctgctctgctctacctgaagaagcagaagaccctgctggcctttgcggaaaagcgagccagcaagacggatgagcacgcagagttgattgtcctgagaagaggaagctacaacgaagccaccaaccgtgtcaagtggcagcctgaggaagtggtgacccaagcccagctggaaggccaccgctccatgaatccatgtcccttgtatgacaagcaaacaaagaccctcttccttttcttcatcgctgtccctgggcgtgtatcagaacatcatcagctccacactaaggttaatgtcacacggctgtgctgtgtcagcagcactgaccatgggaggacctggagccccatccaggacctcacagagaccaccattggcagcactcatcaggaatgggccacatttgctgtgggtcctgggcattgtctgcagctgcggaacccagctgggagcctgctggtacctgcttatgcctaccggaaactgcaccctgctcagaagcctaccccctttgccttctgcttcatcagccttgaccatgggcacacatggaaactaggcaactttgtggctgaaaactcactggagtgccaggtggctgaggttggcactggagctcagaggatggtatatctcaatgctaggagcttcctgggagccagggtccaggcacaaagtcctaatgatggtctggatttccaggacaaccgggtagtgagtaagcttgtagagcccccccacgggtgtcatggaagtgtggttgccttccacaaccccatctctaagccacatgccttagacacatggcttctttatacacaccctacagactccaggaatagaaccaacctgggtgtgtacctaaaccagatgccactagatcccacagcctggtcagagcccaccctgctggccatgggcatctgtgcctactcagacttacagaacatggggcaaggccctgatggctccccacagtttgggtgtctgtatgaatcaggtaactatgaagagatcattttcctcatattcaccctgaagcaagctttccccactgtatttgatgcccagtgatctcagtgcacgtggcccaaagggcttccttgtgcttcaaaacacccatctctctttgcttccagcatcctctggactcttgagtccagctcttgggtaacttcctcaggaggatgcagagaatttggtctcttgactctctgcaggccttattgtttcagcctctggttctcttttcagcccagaaatcaaaggagcctggctttcctcagcctgttggcagggcaggtggggacagtatatatagaggctgccattctgcatgtcggttgtcactatgctagtttaacctgcctgtttccccatgcctagtgtttgaatgagtattaataaaatatccaacccagcccatttcttcctggaaaaaaa

SEQ ID NO: 60 - DNA, 3340 bp, Mus musculus
actgcgcggtgaaggggcgtggcctggccggggaggttgacacccagacgctgctctcagtcctctggcgcctgctccccagcgcattccttctgctcctgggatatttgtctcattactgccagttcttgcgcagcggtcactgggttcgtttcagcgtctgtggtttctgtcgctgttatccagtctccatcgccccagctcagcttcaggccttcttccgagactccacgggagagcccagagagcctccggagccgaagccatggaggaagtcccaccctactccctcagcagcaccctgttccagcaggaagaacagagtggggtgacctaccggatcccagccctgctgtaccttcctcccacccacaccttcctggcctttgcagagaagcggacctcagtcagagatgaggatgctgcctgcctggtgctcagacgagggctgatgaaggggcgctctgtacagtggggcccccaacggctactgatggaggccacattacctgggcatcgcaccatgaacccctgccctgtgtgggagaaaaatactggccgtgtgtacctgtttttcatctgtgtgcggggccatgttactgagaggtgccagattgtgtggggcaaaaatgccgcccgtctctgcttcctttgcagtgaagatgccggctgctcttggggtgaagtgaaagacttgaccgaggaggtcattggctcagaggtgaagcgctgggccacatttgctgtgggcccaggtcatggcatccagctacactcgggaaggctgatcatccccgcctatgcctactatgtctcacgttggtttctctgctttgcgtgttcagtcaagccccattccctgatgatctacagtgatgactttggagtcacatggcaccatggcaagttcattgagccccaggtgacaggggagtgccaagtggccgaagtggctgggacggctggtaaccctgtgctcactgcagtgcccgaacaccaagccgatttcgagcagaggcttttagtactgatagtggtggctgctttcagaagccaaccctgaacccacaactccatgagcctcgaaccggctgccaaggtagtgtagtgagcttccggcctttgaagatgccaaatacctatcaagactcaattggcaaaggtgctcccgctactcagaagtgccctctgctggacagtcctctggaggtggagaaaggagctgaaacaccatcagcaacatggctcttgtactcacatccaactagcaagaggaagaggattaacctaggcatctactacaaccggaaccccttggaggtgaactgctggtcccgcccgtggatcttgaaccgtgggcccagtggctactctgatctggctgttgtggaagaacaggacttggtggcgtgtttgtttgagtgtggggagaagaatgagtatgagcggattgacttctgtctgttttcagaccatgaggtcctgagctgtgaagactgtaccagccctagtagcgactaaagccaaatcaagacggatgagtgaggcccagcttcccacagaaaggaatggcagctacagccagggtaacagaggtctctgatgtctagagaaaactctaaaaactaataatctgctccttgaattttttcacttttcccttcaatgagcatggtgaaaattgtgccatatcttacataacgaggctcttgaactgggagtttgaatctcttctcttcccattaaaaggagaggccatgtgctcgcttcgcgttcgacaaagcctggattctgatcttgagtggaagccacaggcttgtcttttccaatggttcactgctcacctgagtattaggtgatgtgtaggtgccttggccagaagaaagatctgtgttgttgtatttttttaaatttatttatttactatatgtaagtacactgcagctgtcttcagacacaccagaagagggcgtcagatctcattagagatggttgtgagccaccatgtggttgctgggatttgaactcaggaccttcagaagagcagtcagtgctcttaactactgagccatctctcaagccccgcattgctgtatttttaataagaaaaatgcccttatccttccaataatgcctggagctgtacaaattctctgtcttagaagacttgagaaagcagaactgtaaggtcagatgctttctccagccttgatgctgtgttccaccttcccttcctcatccagaaaacagttactagggagaaaatgagaaacccatgccagctgcccttgatgatggttgataacggtgcttattgcttttgatgtcattacctctgttagagatgaatcagagtcagaggtccttagctgcatccacccatttccagggggacattctaacactgctgaacagtcagctaaaatgagagctgtgtgtcctagcctgattccaggttagtcatgatgcttcctggagctgggcttttatctaatcccaggagccatctaggggaggctcagagctagcaggtgatcttcctgagatggtttcaccgtgacaggtgaaccatgagcccttccaagcaaggccaaaggacaacattataggaaagatttctagtattaatatgccttttctctgtgtgtgtactgtcttgtagtgatgctatatagacaaatagatgatttcttattttttgtttgtttgtttgtttttttgtttttctgtagccctagctgtcctggaactcactttgtaaaccaggctggcctcgatctcagaaatccgcctgcctctgcctcccgagtgctgggattaaaggtgtgcaccaccacaccttaatgatgatcctataagtattcctaaaattatactagtaattattaactcctttataataggactgctattaaagccctcgctgatatgaaaactacagtgagaactctgccagtcttcacatgtcataattacttctgagatagaaagcaggcatttacaacttagaacacatttcttagagctgtaaaacaattaactagaggtcataaaagggaatgaaagatttattgtaggtgctaggacagaacataaaatattgactgggcttatctatatgaaacttcattgttaacttttacacaagaattatggtttttaactttcagtgaacctgcggagctagtgacagaagagaaatgtctagttagataactactcttaatggaaattcacataaacatctgttgccatcttctttttgaatttatgtttaaacttgtgaatgtttgaattagacactacgcgagcacatagaaaataaagaactaagcgtgaa

SEQ ID NO: 61 - DNA, 4608 bp, Mus musculus
ggacagtgtgcatcacggagcttgtggcccagactgtgcctggcagacccagaggacctaaggcttggctctagtggtggtcagcacagccctcggtggtctgcggagcctgatattgctttacgtaagggctgttctgctgtgcatctcctgtgtctgaagctattcgccatggagactgctggagctcccttctgcttccatgtggactccctggtaccttgctcctactggaaggttatggggcccacgcgtgttcccaggagaacggtgctcttccagagggaaaggacgggcctgacctaccgtgtgcctgcgttactctgtgtgcctcccaggcctactctgctggccttcgcggaacagcgacttagccctgatgactcccatgcccaccgcctggtgctacggaggggcacgctgaccaggggctcagtgcggtggggcactctgagtgtactggagactgcagtactggaggagcacaggtctatgaacccttgcccggtgctggatgagcactctggtaccatcttcctcttcttcattgccgtgctgggccacacaccggaggccgtgcaaatcgccactggcaagaacgctgctcgcctctgctgtgtgaccagctgtgacgctggcctcacctggggcagtgttcgagatctcactgaggaagccattggtgctgcattgcaggactgggccacctttgctgtgggtccgggccatggagttcagctgcgctcgggtcgcctgcttgttcctgcttacacctatcatgtggaccgacgggaatgttttggcaagatctgctggaccagtccccactccttggcattctacagtgatgatcatgggatctcctggcattgtggaggccttgtgcccaacctacgctctggagagtgccaactggctgcggtagatggagactttctctactgtaatgctcgaagccctctgggtaaccgtgtgcaggcactgagtgctgatgaaggcacgtccttcctaccaggggagctggtgcctacattggcagagacggctcgtggttgccagggtagcattgtgggcttcctagctccaccctcaatcgagcctcaggatgaccggtggacagggagtcctaggaacaccccacattccccatgcttcaatctcagagtacaggagtcttcgggggaaggtgccagaggtcttcttgaacgttggatgcccaggttgcctctctgctacccacagtcccggagcccagagaatcatggcctagagcctgggtcagatggagataagacatcctggactccggaatgtcctatgtcctctgattccatgcttcagagccccacatggctactatattcccacccagcagggcgtagagctcggctccacatgggaatctacctgagccgatcccccttggatccccacagctggacagagccctgggtgatctatgagggccccagtggctactctgaccttgcctttcttgggcctatgcctggggcatccctggtttttgcctgtctgtttgagagcgggaccaggacttcctatgaagacatttctttttgcttgttctcactggcggatgtcctggagaatgtgcccactggcttagagatgctaagtctcagggataaggctcaggggcattgctggccctcttgatggcctcaccctctcgtagccgcctggagaggaagggtagactatatagaggaggttaggggtaggtcagcatgatgctaggatggagagagctctgtcccctcgtggatggtggtggtgactcacccggggggccagctgctttctgagtgcaaatgagaaaaataaagagctgcgctgtgacttttctttccacatcaaagcttgggtgtcagtgctttagcttgatgctctgatcaccatgcaaatcttccaccggcgccttgctcagctttcatatcccaagggtgcctgggaggaaggcaacagggacagtggacatcactgcaccactttccacgaccctgtgtgccaacctcagccactttgaaacatgctgatgactgaggtctgttcactttcttaatttcaagcaggagaagcaggttggggagccagcctccccagctagaggggacagaacttgacttgagcaggggggtacctcctaggacctgctccatgtgcctacttctttacccttctctagagagggctcttgtcctgtcagagctgttttctcccttctcttgttttttctttttcaagactgtttctctgtgttagccctggctgtcctggatctcactctgtagatcaggctgaccttgagttcaaagctccatctgcctctacttctcacattactgtgattaaaggcatatactaccactgcctggtgcccttttgtatttcttattaaagtcctaatgtctgattataaaaacagtctgtgtgggctggagtgatggcttactcagtaaagcacttgccatggaatctgggcaatctgagtttcatttttagcatcctgtaaaaatcccaatttgatggtgtacttgtaatgtcagcatggagaggcagagataggtaagttccccaagactctttgaaccgacagcttggcctcactggcacattccaggtctcagtgagagaccctgcctcaaaatacaaagaaagagctgctgaagagtgggtcagagttgacctctgatctccggaagtatatgatacacacccgtgcatgcactcttccttacaaaataaaaagcaaaacaaaaccccaacaggtatatggccattttagaaaaattagaagatttagaaagctatacataaaaaaaaatgacctaaagaaaaatctttactgttctgggcactatccctatcaaaccactgtgttctttggccaagccttggggtggacactgttttgaggtgggtcctgttatctccactaggtagtggagttttgtgtcagactaactgggtcttaaagctgtctttaaggccatcaggagctactgacttgcctgcctcagcagagcatatcctgaaggtcggggttaagtctccttcccgagcgagttgccttccagtgggcccctggactcctaggtcctcagcgctcatcagctgccaaggactctgagggaatgtcctctgactgtggccccgaaaggtaggggagggggatgtgcttaggcttaggacagggtcctgtttcagtctgccttcactgttagtagcactgtgccacatggcacagactgggcgagctttaaaggaaggaggttgatattggttcccacttctggggatcatggttgagcagccttgtctgatgatggttgtcttgatggtagatcgtgaggtagttgatgaaggtatgacatggtgagaaactctgtgtgtgtgtgttattttctctgtgttctacctatacatctatctatgtatatatgtatctatctatctacctggaggctggagagatagcttagtggttaagaacatttgttgttcttgcatagtcctggatttaaattttcagcacccacatggcagctcacaacaacccataaatccagtttcagaggatccaacctctgatataccatgtcagccagagcagacacggctgaaggtggtttgatccccgtatggagaggtgacaattgggaagagagaaagatcaacttaaccatgcaaggaacaggaagttaaatactgaacagggaaggtaaaggcaggaagtagatgtagagggcaaatcaatgaaacccaaacatacccaaattacgctaaacacacactgacatgccaattaaaaggacaaattggctccactggcaaaaccaaaacagacactgaagatccaaacagtcacatgccaactaccgcggagggagacagacacagagaagaccgtgacagacacttggacactcttgagagtggatgtgcaggaagagagctctgccagtggagaagaaagcactcagaagaaagtgacagcagctgtaaatttgtattctgctaatgttatgttccaaagttgaaagcaaaattgtaccaattcataagaacaaacaggctgactctcagttgtgactgaacgtctctcagtaactgacggggcgagcaggccaaaggagagtcggctcagaagggtgcatagccacgccaaatcaaataagcaagtacaaccggcaggctctatttctagcacaaaggggtctgtgcctcattctgtgcttgggtcagagcttgggtctctcatttggatgtaagtggtgtagtggagaagcaggaaataatccggagcgcatattttgattttaacataagtgctgatttgggagggagttttgtcaaattgtgtttttacaatgtttttttttttttaaatgatgcttttttgtaaagtgtacaaatgtgatataagattggttctgctacattcagtttctataaaagtggttctaaaatattgtactgtcaatcatctcatgattattctactgtacacattactgactttgtatgtaataattaatattagaagaaaatataatttatttgaatataaaaaaaaaaaaaaaaaaa

SEQ ID NO: 62 - protein, 227 aa, Artificial Sequence
  Description of Artificial Sequence: Synthetic polypeptide
DKTHTCPPCPAPELLGGPSVFLFPPKPKDTLMISRTPEVTCVVVDVSHEDPEVKFNWYVDGVEVHNAKTKPREEQYNSTYRVVSVLTVLHQDWLNGKEYKCKVSNKALPAPIEKTISKAKGQPREPQVYTLPPSREEMTKNQVSLTCLVKGFYPSDIAVEWESNGQPENNYKTTPPVLDSDGSFFLYSKLTVDKSRWQQGNVFSCSVMHEALHNHYTQKSLSLSPGK

SEQ ID NO: 63 - protein, 380 aa, Artificial Sequence
  Description of Artificial Sequence: Synthetic polypeptide
MASLPYLQKESVFQSGAHAYRIPALLYLPGQQSLLAFAEQRASKKDEHAELIVLRRGDYDAPTHQVQWQAQEVVAQARLDGHRSMNPCPLYDAQTGTLFLFFIAIPGQVTEQQQLQTRANVTRLCQVTSTDHGRTWSSPRDLTDAAIGPAYREWSTFAVGPGHCLQLHDRARSLVVPAYAYRKLHPKQRPIPSAFCFLSHDHGRTWARGHFVAQDTLECQVAEVETGEQRVVTLNARSHLRARVQAQSTNDGLDFQESQLVKKLVEPPPQGCQGSVISFPSPRSGPGSPAQWLLYTHPTHSWQRADLGAYLNPRPPAPEAWSEPVLLAKGSCAYSDLQSMGTGPDGSPLFGCLYEANDYEEIVFLMFTLKQAFPAEYLPQ

SEQ ID NO: 64 - protein, 380 aa, Artificial Sequence
  Description of Artificial Sequence: Synthetic polypeptide
MASLPYLQKESVFQSGAHAYRIPALLYLPGQQSLLAFAEQRASKKDEHAELIVLRRGDYDAPTHQVQWQAQEVVAQARLDGHRSMNPCPLYDAQTGTLFLFFIAIPGQVTEQQQLQTRANVTRLCQVTSTDHGRTWSSPRDLTDAAIGPAYREWSTFAVGPGHCLQLHDRARSLVVPAYAYRKLHPKQRPIPSAFCFLSHDHGRTWARGHFVAQDTLECQVAEVETGEQRVVTLNARSHLRARVQAQSTNDGLDFQESQLVKKLVEPPPQGCQGSVISFPSPRSGPGSPAQWLLYTHPTHSWQRADLGAYLNPRPPAPEAWSEPVLLAKGSAAYSDLQSMGTGPDGSPLFGCLYEANDYEEIVFLMFTLKQAFPAEYLPQ

SEQ ID NO: 65 - protein, 380 aa, Artificial Sequence
  Description of Artificial Sequence: Synthetic polypeptide
AASLPYLQKESVFQSGAHAYRIPALLYLPGQQSLLAFAEQRASKKDEHAELIVLRRGDYDAPTHQVQWQAQEVVAQARLDGHRSMNPCPLYDAQTGTLFLFFIAIPGQVTEQQQLQTRANVTRLCQVTSTDHGRTWSSPRDLTDAAIGPAYREWSTFAVGPGHCLQLHDRARSLVVPAYAYRKLHPKQRPIPSAFCFLSHDHGRTWARGHFVAQDTLECQVAEVETGEQRVVTLNARSHLRARVQAQSTNDGLDFQESQLVKKLVEPPPQGCQGSVISFPSPRSGPGSPAQWLLYTHPTHSWQRADLGAYLNPRPPAPEAWSEPVLLAKGSCAYSDLQSMGTGPDGSPLFGCLYEANDYEEIVFLMFTLKQAFPAEYLPQ

SEQ ID NO: 66 - protein, 380 aa, Artificial Sequence
  Description of Artificial Sequence: Synthetic polypeptide
DASLPYLQKESVFQSGAHAYRIPALLYLPGQQSLLAFAEQRASKKDEHAELIVLRRGDYDAPTHQVQWQAQEVVAQARLDGHRSMNPCPLYDAQTGTLFLFFIAIPGQVTEQQQLQTRANVTRLCQVTSTDHGRTWSSPRDLTDAAIGPAYREWSTFAVGPGHCLQLHDRARSLVVPAYAYRKLHPKQRPIPSAFCFLSHDHGRTWARGHFVAQDTLECQVAEVETGEQRVVTLNARSHLRARVQAQSTNDGLDFQESQLVKKLVEPPPQGCQGSVISFPSPRSGPGSPAQWLLYTHPTHSWQRADLGAYLNPRPPAPEAWSEPVLLAKGSCAYSDLQSMGTGPDGSPLFGCLYEANDYEEIVFLMFTLKQAFPAEYLPQ

SEQ ID NO: 67 - protein, 874 aa, Artificial Sequence
  Description of Artificial Sequence: Synthetic polypeptide
MASLPYLQKESVFQSGAHAYRIPALLYLPGQQSLLAFAEQRASKKDEHAELIVLRRGDYDAPTHQVQWQAQEVVAQARLDGHRSMNPCPLYDAQTGTLFLFFIAIPGQVTEQQQLQTRANVTRLCQVTSTDHGRTWSSPRDLTDAAIGPAYREWSTFAVGPGHCLQLHDRARSLVVPAYAYRKLHPKQRPIPSAFCFLSHDHGRTWARGHFVAQDTLECQVAEVETGEQRVVTLNARSHLRARVQAQSTNDGLDFQESQLVKKLVEPPPQGCQGSVISFPSPRSGPGSPAQWLLYTHPTHSWQRADLGAYLNPRPPAPEAWSEPVLLAKGSCAYSDLQSMGTGPDGSPLFGCLYEANDYEEIVFLMFTLKQAFPAEYLPQGGGGSGGGGSDKTHTCPPCPAPELLGGPSVFLFPPKPKDTLMISRTPEVTCVVVDVSHEDPEVKFNWYVDGVEVHNAKTKPREEQYNSTYRVVSVLTVLHQDWLNGKEYKCKVSNKALPAPIEKTISKAKGQPREPQVYTLPPSREEMTKNQVSLTCLVKGFYPSDIAVEWESNGQPENNYKTTPPVLDSDGSFFLYSKLTVDKSRWQQGNVFSCSVMHEALHNHYTQKSLSLSPGKGGGGSGGGGSGGGGSEVQLVESGGGLVQPGGSLRLSCAASGFNIKDTYIHWVRQAPGKGLEWVARIYPTNGYTRYADSVKGRFTISADTSKNTAYLQMNSLRAEDTAVYYCSRWGGDGFYAMDYWGQGTLVTVSSGGGGSGGGGSGGGGSDIQMTQSPSSLSASVGDRVTITCRASQDVNTAVAWYQQKPGKAPKLLIYSASFLYSGVPSRFSGSRSGTDFTLTISSLQPEDFATYYCQQHYTTPPTFGQGTKVEIK

SEQ ID NO: 68 - protein, 874 aa, Artificial Sequence
  Description of Artificial Sequence: Synthetic polypeptide
MASLPYLQKESVFQSGAHAYRIPALLYLPGQQSLLAFAEQRASKKDEHAELIVLRRGDYDAPTHQVQWQAQEVVAQARLDGHRSMNPCPLYDAQTGTLFLFFIAIPGQVTEQQQLQTRANVTRLCQVTSTDHGRTWSSPRDLTDAAIGPAYREWSTFAVGPGHCLQLHDRARSLVVPAYAYRKLHPKQRPIPSAFCFLSHDHGRTWARGHFVAQDTLECQVAEVETGEQRVVTLNARSHLRARVQAQSTNDGLDFQESQLVKKLVEPPPQGCQGSVISFPSPRSGPGSPAQWLLYTHPTHSWQRADLGAYLNPRPPAPEAWSEPVLLAKGSAAYSDLQSMGTGPDGSPLFGCLYEANDYEEIVFLMFTLKQAFPAEYLPQGGGGSGGGGSDKTHTCPPCPAPELLGGPSVFLFPPKPKDTLMISRTPEVTCVVVDVSHEDPEVKFNWYVDGVEVHNAKTKPREEQYNSTYRVVSVLTVLHQDWLNGKEYKCKVSNKALPAPIEKTISKAKGQPREPQVYTLPPSREEMTKNQVSLTCLVKGFYPSDIAVEWESNGQPENNYKTTPPVLDSDGSFFLYSKLTVDKSRWQQGNVFSCSVMHEALHNHYTQKSLSLSPGKGGGGSGGGGSGGGGSEVQLVESGGGLVQPGGSLRLSCAASGFNIKDTYIHWVRQAPGKGLEWVARIYPTNGYTRYADSVKGRFTISADTSKNTAYLQMNSLRAEDTAVYYCSRWGGDGFYAMDYWGQGTLVTVSSGGGGSGGGGSGGGGSDIQMTQSPSSLSASVGDRVTITCRASQDVNTAVAWYQQKPGKAPKLLIYSASFLYSGVPSRFSGSRSGTDFTLTISSLQPEDFATYYCQQHYTTPPTFGQGTKVEIK

SEQ ID NO: 69 - protein, 617 aa, Artificial Sequence
  Description of Artificial Sequence: Synthetic polypeptide
AASLPYLQKESVFQSGAHAYRIPALLYLPGQQSLLAFAEQRASKKDEHAELIVLRRGDYDAPTHQVQWQAQEVVAQARLDGHRSMNPCPLYDAQTGTLFLFFIAIPGQVTEQQQLQTRANVTRLCQVTSTDHGRTWSSPRDLTDAAIGPAYREWSTFAVGPGHCLQLHDRARSLVVPAYAYRKLHPKQRPIPSAFCFLSHDHGRTWARGHFVAQDTLECQVAEVETGEQRVVTLNARSHLRARVQAQSTNDGLDFQESQLVKKLVEPPPQGCQGSVISFPSPRSGPGSPAQWLLYTHPTHSWQRADLGAYLNPRPPAPEAWSEPVLLAKGSCAYSDLQSMGTGPDGSPLFGCLYEANDYEEIVFLMFTLKQAFPAEYLPQGGGGSGGGGSDKTHTCPPCPAPELLGGPSVFLFPPKPKDTLMISRTPEVTCVVVDVSHEDPEVKFNWYVDGVEVHNAKTKPREEQYNSTYRVVSVLTVLHQDWLNGKEYKCKVSNKALPAPIEKTISKAKGQPREPQVYTLPPSREEMTKNQVSLTCLVKGFYPSDIAVEWESNGQPENNYKTTPPVLDSDGSFFLTSKLTVDKSRWQQGNVFSCSVMHEALHNHYTQKSLSLSPGK

SEQ ID NO: 70 - protein, 617 aa, Artificial Sequence
  Description of Artificial Sequence: Synthetic polypeptide
DASLPYLQKESVFQSGAHAYRIPALLYLPGQQSLLAFAEQRASKKDEHAELIVLRRGDYDAPTHQVQWQAQEVVAQARLDGHRSMNPCPLYDAQTGTLFLFFIAIPGQVTEQQQLQTRANVTRLCQVTSTDHGRTWSSPRDLTDAAIGPAYREWSTFAVGPGHCLQLHDRARSLVVPAYAYRKLHPKQRPIPSAFCFLSHDHGRTWARGHFVAQDTLECQVAEVETGEQRVVTLNARSHLRARVQAQSTNDGLDFQESQLVKKLVEPPPQGCQGSVISFPSPRSGPGSPAQWLLYTHPTHSWQRADLGAYLNPRPPAPEAWSEPVLLAKGSCAYSDLQSMGTGPDGSPLFGCLYEANDYEEIVFLMFTLKQAFPAEYLPQGGGGSGGGGSDKTHTCPPCPAPELLGGPSVFLFPPKPKDTLMISRTPEVTCVVVDVSHEDPEVKFNWYVDGVEVHNAKTKPREEQYNSTYRVVSVLTVLHQDWLNGKEYKCKVSNKALPAPIEKTISKAKGQPREPQVYTLPPSREEMTKNQVSLTCLVKGFYPSDIAVEWESNGQPENNYKTTPPVLDSDGSFFLTSKLTVDKSRWQQGNVFSCSVMHEALHNHYTQKSLSLSPGK

SEQ ID NO: 71 - protein, 617 aa, Artificial Sequence
  Description of Artificial Sequence: Synthetic polypeptide
MASLPYLQKESVFQSGAHAYRIPALLYLPGQQSLLAFAEQRASKKDEHAELIVLRRGDYDAPTHQVQWQAQEVVAQARLDGHRSMNPCPLYDAQTGTLFLFFIAIPGQVTEQQQLQTRANVTRLCQVTSTDHGRTWSSPRDLTDAAIGPAYREWSTFAVGPGHCLQLHDRARSLVVPAYAYRKLHPKQRPIPSAFCFLSHDHGRTWARGHFVAQDTLECQVAEVETGEQRVVTLNARSHLRARVQAQSTNDGLDFQESQLVKKLVEPPPQGCQGSVISFPSPRSGPGSPAQWLLYTHPTHSWQRADLGAYLNPRPPAPEAWSEPVLLAKGSCAYSDLQSMGTGPDGSPLFGCLYEANDYEEIVFLMFTLKQAFPAEYLPQGGGGSGGGGSDKTHTCPPCPAPELLGGPSVFLFPPKPKDTLMISRTPEVTCVVVDVSHEDPEVKFNWYVDGVEVHNAKTKPREEQYNSTYRVVSVLTVLHQDWLNGKEYKCKVSNKALPAPIEKTISKAKGQPREPQVYTLPPSREEMTKNQVSLTCLVKGFYPSDIAVEWESNGQPENNYKTTPPVLDSDGSFFLTSKLTVDKSRWQQGNVFSCSVMHEALHNHYTQKSLSLSPGK

SEQ ID NO: 72 - protein, 617 aa, Artificial Sequence
  Description of Artificial Sequence: Synthetic polypeptide
MASLPYLQKESVFQSGAHAYRIPALLYLPGQQSLLAFAEQRASKKDEHAELIVLRRGDYDAPTHQVQWQAQEVVAQARLDGHRSMNPCPLYDAQTGTLFLFFIAIPGQVTEQQQLQTRANVTRLCQVTSTDHGRTWSSPRDLTDAAIGPAYREWSTFAVGPGHCLQLHDRARSLVVPAYAYRKLHPKQRPIPSAFCFLSHDHGRTWARGHFVAQDTLECQVAEVETGEQRVVTLNARSHLRARVQAQSTNDGLDFQESQLVKKLVEPPPQGCQGSVISFPSPRSGPGSPAQWLLYTHPTHSWQRADLGAYLNPRPPAPEAWSEPVLLAKGSAAYSDLQSMGTGPDGSPLFGCLYEANDYEEIVFLMFTLKQAFPAEYLPQGGGGSGGGGSDKTHTCPPCPAPELLGGPSVFLFPPKPKDTLMISRTPEVTCVVVDVSHEDPEVKFNWYVDGVEVHNAKTKPREEQYNSTYRVVSVLTVLHQDWLNGKEYKCKVSNKALPAPIEKTISKAKGQPREPQVYTLPPSREEMTKNQVSLTCLVKGFYPSDIAVEWESNGQPENNYKTTPPVLDSDGSFFLTSKLTVDKSRWQQGNVFSCSVMHEALHNHYTQKSLSLSPGK

SEQ ID NO: 73 - protein, 380 aa, Artificial Sequence
  Description of Artificial Sequence: Synthetic polypeptide
  MOD_RES (1)..(1): Ala, Asn, Asp, His, Leu, Met, Phe, Thr, or not present
  MOD_RES (6)..(6): Phe, Trp, Tyr or Val
  MOD_RES (187)..(187): Arg, Ile, or Lys
  MOD_RES (332)..(332): Ala, Cys, Ser, or Val
XASLPXLQKESVFQSGAHAYRIPALLYLPGQQSLLAFAEQRASKKDEHAELIVLRRGDYDAPTHQVQWQAQEVVAQARLDGHRSMNPCPLYDAQTGTLFLFFIAIPGQVTEQQQLQTRANVTRLCQVTSTDHGRTWSSPRDLTDAAIGPAYREWSTFAVGPGHCLQLHDRARSLVVPAYAYRKLHPXQRPIPSAFCFLSHDHGRTWARGHFVAQDTLECQVAEVETGEQRVVTLNARSHLRARVQAQSTNDGLDFQESQLVKKLVEPPPQGCQGSVISFPSPRSGPGSPAQWLLYTHPTHSWQRADLGAYLNPRPPAPEAWSEPVLLAKGSXAYSDLQSMGTGPDGSPLFGCLYEANDYEEIVFLMFTLKQAFPAEYLPQ

SEQ ID NO: 74 - protein, 617 aa, Artificial Sequence
  Description of Artificial Sequence: Synthetic polypeptide
  MOD_RES (1)..(1): Ala, Asn, Asp, His, Leu, Met, Phe, Thr, or not present
  MOD_RES (6)..(6): Phe, Trp, Tyr or Val
  MOD_RES (187)..(187): Arg, Ile, or Lys
  MOD_RES (332)..(332): Ala, Cys, Ser, or Val.
XASLPXLQKESVFQSGAHAYRIPALLYLPGQQSLLAFAEQRASKKDEHAELIVLRRGDYDAPTHQVQWQAQEVVAQARLDGHRSMNPCPLYDAQTGTLFLFFIAIPGQVTEQQQLQTRANVTRLCQVTSTDHGRTWSSPRDLTDAAIGPAYREWSTFAVGPGHCLQLHDRARSLVVPAYAYRKLHPXQRPIPSAFCFLSHDHGRTWARGHFVAQDTLECQVAEVETGEQRVVTLNARSHLRARVQAQSTNDGLDFQESQLVKKLVEPPPQGCQGSVISFPSPRSGPGSPAQWLLYTHPTHSWQRADLGAYLNPRPPAPEAWSEPVLLAKGSXAYSDLQSMGTGPDGSPLFGCLYEANDYEEIVFLMFTLKQAFPAEYLPQGGGGSGGGGSDKTHTCPPCPAPELLGGPSVFLFPPKPKDTLMISRTPEVTCVVVDVSHEDPEVKFNWYVDGVEVHNAKTKPREEQYNSTYRVVSVLTVLHQDWLNGKEYKCKVSNKALPAPIEKTISKAKGQPREPQVYTLPPSREEMTKNQVSLTCLVKGFYPSDIAVEWESNGQPENNYKTTPPVLDSDGSFFLTSKLTVDKSRWQQGNVFSCSVMHEALHNHYTQKSLSLSPGK

SEQ ID NO: 75 - protein, 874 aa, Artificial Sequence
  Description of Artificial Sequence: Synthetic polypeptide
  MOD_RES (1)..(1): Ala, Asn, Asp, His, Leu, Met, Phe, Thr, or not present
  MOD_RES (6)..(6): Phe, Trp, Tyr or Val
  MOD_RES (187)..(187): Arg, Ile, or Lys
  MOD_RES (332)..(332): Ala, Cys, Ser, or Val.
XASLPXLQKESVFQSGAHAYRIPALLYLPGQQSLLAFAEQRASKKDEHAELIVLRRGDYDAPTHQVQWQAQEVVAQARLDGHRSMNPCPLYDAQTGTLFLFFIAIPGQVTEQQQLQTRANVTRLCQVTSTDHGRTWSSPRDLTDAAIGPAYREWSTFAVGPGHCLQLHDRARSLVVPAYAYRKLHPXQRPIPSAFCFLSHDHGRTWARGHFVAQDTLECQVAEVETGEQRVVTLNARSHLRARVQAQSTNDGLDFQESQLVKKLVEPPPQGCQGSVISFPSPRSGPGSPAQWLLYTHPTHSWQRADLGAYLNPRPPAPEAWSEPVLLAKGSXAYSDLQSMGTGPDGSPLFGCLYEANDYEEIVFLMFTLKQAFPAEYLPQGGGGSGGGGSDKTHTCPPCPAPELLGGPSVFLFPPKPKDTLMISRTPEVTCVVVDVSHEDPEVKFNWYVDGVEVHNAKTKPREEQYNSTYRVVSVLTVLHQDWLNGKEYKCKVSNKALPAPIEKTISKAKGQPREPQVYTLPPSREEMTKNQVSLTCLVKGFYPSDIAVEWESNGQPENNYKTTPPVLDSDGSFFLYSKLTVDKSRWQQGNVFSCSVMHEALHNHYTQKSLSLSPGKGGGGSGGGGSGGGGSEVQLVESGGGLVQPGGSLRLSCAASGFNIKDTYIHWVRQAPGKGLEWVARIYPTNGYTRYADSVKGRFTISADTSKNTAYLQMNSLRAEDTAVYYCSRWGGDGFYAMDYWGQGTLVTVSSGGGGSGGGGSGGGGSDIQMTQSPSSLSASVGDRVTITCRASQDVNTAVAWYQQKPGKAPKLLIYSASFLYSGVPSRFSGSRSGTDFTLTISSLQPEDFATYYCQQHYTTPPTFGQGTKVEIK

SEQ ID NO: 76 - protein, 380 aa, Artificial Sequence
  Description of Artificial Sequence: Synthetic polypeptide
  MOD_RES (1)..(1): Ala, Arg, Asn, Asp, Gln, Glu, Gly, His, Leu, Lys, Met, Phe, Thr, Val, or not present
  MOD_RES (2)..(2): Ala or Lys
  MOD_RES (4)..(4): Asn or Leu
  MOD_RES (6)..(6): Phe, Trp, Tyr or Val
  MOD_RES (125)..(125): Ala, Cys, Ile, Ser, or Val
  MOD_RES (187)..(187): Arg, Ile, or Lys
  MOD_RES (196)..(196): Ala, Cys, Leu, or Val
  MOD_RES (257)..(257): Glu or Lys
  MOD_RES (272)..(272): Cys or Val
  MOD_RES (325)..(325): Lys or Val
  MOD_RES (332)..(332): Ala, Cys, Ser, or Val
  MOD_RES (352)..(352): Cys, Leu, or Val
XXSXPXLQKESVFQSGAHAYRIPALLYLPGQQSLLAFAEQRASKKDEHAELIVLRRGDYDAPTHQVQWQAQEVVAQARLDGHRSMNPCPLYDAQTGTLFLFFIAIPGQVTEQQQLQTRANVTRLXQVTSTDHGRTWSSPRDLTDAAIGPAYREWSTFAVGPGHCLQLHDRARSLVVPAYAYRKLHPXQRPIPSAFXFLSHDHGRTWARGHFVAQDTLECQVAEVETGEQRVVTLNARSHLRARVQAQSTNDGLDFQXSQLVKKLVEPPPQGXQGSVISFPSPRSGPGSPAQWLLYTHPTHSWQRADLGAYLNPRPPAPEAWSEPXLLAKGSXAYSDLQSMGTGPDGSPLFGXLYEANDYEEIVFLMFTLKQAFPAEYLPQ

SEQ ID NO: 77 - protein, 617 aa, Artificial Sequence
  Description of Artificial Sequence: Synthetic polypeptide
  MOD_RES (1)..(1): Ala, Arg, Asn, Asp, Gln, Glu, Gly, His, Leu, Lys, Met, Phe, Thr, Val, or not present
  MOD_RES (2)..(2): Ala or Lys
  MOD_RES (4)..(4): Asn or Leu
  MOD_RES (6)..(6): Phe, Trp, Tyr or Val
  MOD_RES (125)..(125): Ala, Cys, Ile, Ser, or Val
  MOD_RES (187)..(187): Arg, Ile, or Lys
  MOD_RES (196)..(196): Ala, Cys, Leu, or Val
  MOD_RES (257)..(257): Glu or Lys
  MOD_RES (272)..(272): Cys or Val
  MOD_RES (325)..(325): Lys or Val
  MOD_RES (332)..(332): Ala, Cys, Ser, or Val
  MOD_RES (352)..(352): Cys, Leu, or Val
XXSXPXLQKESVFQSGAHAYRIPALLYLPGQQSLLAFAEQRASKKDEHAELIVLRRGDYDAPTHQVQWQAQEVVAQARLDGHRSMNPCPLYDAQTGTLFLFFIAIPGQVTEQQQLQTRANVTRLXQVTSTDHGRTWSSPRDLTDAAIGPAYREWSTFAVGPGHCLQLHDRARSLVVPAYAYRKLHPXQRPIPSAFXFLSHDHGRTWARGHFVAQDTLECQVAEVETGEQRVVTLNARSHLRARVQAQSTNDGLDFQXSQLVKKLVEPPPQGXQGSVISFPSPRSGPGSPAQWLLYTHPTHSWQRADLGAYLNPRPPAPEAWSEPXLLAKGSXAYSDLQSMGTGPDGSPLFGXLYEANDYEEIVFLMFTLKQAFPAEYLPQGGGGSGGGGSDKTHTCPPCPAPELLGGPSVFLFPPKPKDTLMISRTPEVTCVVVDVSHEDPEVKFNWYVDGVEVHNAKTKPREEQYNSTYRVVSVLTVLHQDWLNGKEYKCKVSNKALPAPIEKTISKAKGQPREPQVYTLPPSREEMTKNQVSLTCLVKGFYPSDIAVEWESNGQPENNYKTTPPVLDSDGSFFLTSKLTVDKSRWQQGNVFSCSVMHEALHNHYTQKSLSLSPGK

SEQ ID NO: 78 - protein, 874 aa, Artificial Sequence
  Description of Artificial Sequence: Synthetic polypeptide
  MOD_RES (1)..(1): Ala, Arg, Asn, Asp, Gln, Glu, Gly, His, Leu, Lys, Met, Phe, Thr, Val, or not present
  MOD_RES (2)..(2): Ala or Lys
  MOD_RES (4)..(4): Asn or Leu
  MOD_RES (6)..(6): Phe, Trp, Tyr or Val
  MOD_RES (125)..(125): Ala, Cys, Ile, Ser, or Val
  MOD_RES (187)..(187): Arg, Ile, or Lys
  MOD_RES (196)..(196): Ala, Cys, Leu, or Val
  MOD_RES (257)..(257): Glu or Lys
  MOD_RES (272)..(272): Cys or Val
  MOD_RES (325)..(325): Lys or Val
  MOD_RES (332)..(332): Ala, Cys, Ser, or Val
  MOD_RES (352)..(352): Cys, Leu, or Val
XXSXPXLQKESVFQSGAHAYRIPALLYLPGQQSLLAFAEQRASKKDEHAELIVLRRGDYDAPTHQVQWQAQEVVAQARLDGHRSMNPCPLYDAQTGTLFLFFIAIPGQVTEQQQLQTRANVTRLXQVTSTDHGRTWSSPRDLTDAAIGPAYREWSTFAVGPGHCLQLHDRARSLVVPAYAYRKLHPXQRPIPSAFXFLSHDHGRTWARGHFVAQDTLECQVAEVETGEQRVVTLNARSHLRARVQAQSTNDGLDFQXSQLVKKLVEPPPQGXQGSVISFPSPRSGPGSPAQWLLYTHPTHSWQRADLGAYLNPRPPAPEAWSEPXLLAKGSXAYSDLQSMGTGPDGSPLFGXLYEANDYEEIVFLMFTLKQAFPAEYLPQGGGGSGGGGSDKTHTCPPCPAPELLGGPSVFLFPPKPKDTLMISRTPEVTCVVVDVSHEDPEVKFNWYVDGVEVHNAKTKPREEQYNSTYRVVSVLTVLHQDWLNGKEYKCKVSNKALPAPIEKTISKAKGQPREPQVYTLPPSREEMTKNQVSLTCLVKGFYPSDIAVEWESNGQPENNYKTTPPVLDSDGSFFLYSKLTVDKSRWQQGNVFSCSVMHEALHNHYTQKSLSLSPGKGGGGSGGGGSGGGGSEVQLVESGGGLVQPGGSLRLSCAASGFNIKDTYIHWVRQAPGKGLEWVARIYPTNGYTRYADSVKGRFTISADTSKNTAYLQMNSLRAEDTAVYYCSRWGGDGFYAMDYWGQGTLVTVSSGGGGSGGGGSGGGGSDIQMTQSPSSLSASVGDRVTITCRASQDVNTAVAWYQQKPGKAPKLLIYSASFLYSGVPSRFSGSRSGTDFTLTISSLQPEDFATYYCQQHYTTPPTFGQGTKVEIK

SEQ ID NO: 79 - protein, 7 aa, Unknown
  Description of Unknown: recombinant mutant human sialidase sequence
LSHSLST

SEQ ID NO: 80 - protein, 47 aa, Homo sapiens
MTGERPSTALPDRRWGPRILGFWGGCRVWVFAAIFLLLSLAASWSKA

SEQ ID NO: 81 - protein, 380 aa, Artificial Sequence
  Description of Artificial Sequence: Synthetic polypeptide
  MOD_RES (1)..(1): Ala, Arg, Asn, Asp, Gln, Glu, Gly, His, Leu, Lys, Met, Phe, Thr, Val, or not present
  MOD_RES (2)..(2): Ala or Lys
  MOD_RES (4)..(4): Asn or Leu
  MOD_RES (5)..(5): Pro or His
  MOD_RES (6)..(6): Phe, Trp, Tyr or Val
  MOD_RES (9)..(9): Lys or Asp
  MOD_RES (44)..(44): Lys, Arg, or Glu
  MOD_RES (45)..(45): Lys, Ala, Arg, or Glu
  MOD_RES (54)..(54): Leu or Met
  MOD_RES (62)..(62): Pro, Asn, Asp, His, Glu, Gly, Ser or Thr
  MOD_RES (69)..(69): Gln or His
  MOD_RES (78)..(78): Arg or Lys
  MOD_RES (93)..(93): Ala, Glu or Lys
  MOD_RES (107)..(107): Gly or Asp
  MOD_RES (108)..(108): Gln or His
  MOD_RES (112)..(112): Gln, Arg, or Lys
  MOD_RES (125)..(125): Ala, Cys, Ile, Ser, Val, or Leu
  MOD_RES (126)..(126): Gln or Leu
  MOD_RES (150)..(150): Ala or Val
  MOD_RES (164)..(164): Cys or Gly
  MOD_RES (171)..(171): Ala or Gly
  MOD_RES (187)..(187): Arg, Ile, or Lys
  MOD_RES (196)..(196): Ala, Cys, Leu, or Val
  MOD_RES (217)..(217): Leu, Ala, or Val
  MOD_RES (249)..(249): Thr or Ala
  MOD_RES (251)..(251): Asp or Gly
  MOD_RES (257)..(257): Glu or Lys
  MOD_RES (270)..(270): Gln, Ala, His, Phe, or Pro
  MOD_RES (272)..(272): Cys or Val
  MOD_RES (292)..(292): Trp or Arg
  MOD_RES (301)..(301): Ser or Arg
  MOD_RES (302)..(302): Trp or Lys
  MOD_RES (325)..(325): Lys or Val
  MOD_RES (332)..(332): Ala, Cys, Ser, or Val
  MOD_RES (352)..(352): Cys, Leu, or Val
  MOD_RES (363)..(363): Val or Arg
  MOD_RES (365)..(365): Leu, Gln, His, Ile, Lys, or Ser
XXSXXXLQXESVFQSGAHAYRIPALLYLPGQQSLLAFAEQRASXXDEHAELIVXRRGDYDAXTHQVQWXAQEVVAQAXLDGHRSMNPCPLYDXQTGTLFLFFIAIPXXVTEXQQLQTRANVTRLXXVTSTDHGRTWSSPRDLTDAAIGPXYREWSTFAVGPGHXLQLHDRXRSLVVPAYAYRKLHPXQRPIPSAFXFLSHDHGRTWARGHFVAQDTXECQVAEVETGEQRVVTLNARSHLRARVQAQSXNXGLDFQXSQLVKKLVEPPPXGXQGSVISFPSPRSGPGSPAQXLLYTHPTHXXQRADLGAYLNPRPPAPEAWSEPXLLAKGSXAYSDLQSMGTGPDGSPLFGXLYEANDYEEIXFXMFTLKQAFPAEYLPQ

SEQ ID NO: 82 - protein, 380 aa, Artificial Sequence
  Description of Artificial Sequence: Synthetic polypeptide
  MOD_RES (1)..(1): Ala, Arg, Asn, Asp, Gln, Glu, Gly, His, Leu, Lys, Met, Phe, Thr, Val, or not present
  MOD_RES (6)..(6): Phe, Trp, Tyr or Val
  MOD_RES (9)..(9): Lys or Asp
  MOD_RES (62)..(62): Pro, Asn, Asp, His, Glu, Gly, Ser or Thr
  MOD_RES (93)..(93): Ala, Glu, or Lys
  MOD_RES (187)..(187): Arg, Ile, or Lys
  MOD_RES (270)..(270): Gln, Ala, His, Phe, or Pro
  MOD_RES (301)..(301): Ser or Arg
  MOD_RES (302)..(302): Trp or Lys
  MOD_RES (332)..(332): Ala, Cys, Ser, or Val
  MOD_RES (363)..(363): Val or Arg
  MOD_RES (365)..(365): Leu, Gln, His, Ile, Lys, or Ser
XASLPXLQXESVFQSGAHAYRIPALLYLPGQQSLLAFAEQRASKKDEHAELIVLRRGDYDAXTHQVQWQAQEVVAQARLDGHRSMNPCPLYDXQTGTLFLFFIAIPGQVTEQQQLQTRANVTRLCQVTSTDHGRTWSSPRDLTDAAIGPAYREWSTFAVGPGHCLQLHDRARSLVVPAYAYRKLHPXQRPIPSAFCFLSHDHGRTWARGHFVAQDTLECQVAEVETGEQRVVTLNARSHLRARVQAQSTNDGLDFQESQLVKKLVEPPPXGCQGSVISFPSPRSGPGSPAQWLLYTHPTHXXQRADLGAYLNPRPPAPEAWSEPVLLAKGSXAYSDLQSMGTGPDGSPLFGCLYEANDYEEIXFXMFTLKQAFPAEYLPQ

SEQ ID NO: 83 - protein, 380 aa, Artificial Sequence
  Description of Artificial Sequence: Synthetic polypeptide
DASLPYLQKESVFQSGAHAYRIPALLYLPGQQSLLAFAEQRASKKDEHAELIVLRRGDYDAGTHQVQWQAQEVVAQARLDGHRSMNPCPLYDEQTGTLFLFFIAIPGQVTEQQQLQTRANVTRLCQVTSTDHGRTWSSPRDLTDAAIGPAYREWSTFAVGPGHCLQLHDRARSLVVPAYAYRKLHPKQRPIPSAFCFLSHDHGRTWARGHFVAQDTLECQVAEVETGEQRVVTLNARSHLRARVQAQSTNDGLDFQESQLVKKLVEPPPQGCQGSVISFPSPRSGPGSPAQWLLYTHPTHSWQRADLGAYLNPRPPAPEAWSEPVLLAKGSAAYSDLQSMGTGPDGSPLFGCLYEANDYEEIVFLMFTLKQAFPAEYLPQ

SEQ ID NO: 84 - protein, 380 aa, Artificial Sequence
  Description of Artificial Sequence: Synthetic polypeptide
DASLPYLQDESVFQSGAHAYRIPALLYLPGQQSLLAFAEQRASKKDEHAELIVLRRGDYDAPTHQVQWQAQEVVAQARLDGHRSMNPCPLYDEQTGTLFLFFIAIPGQVTEQQQLQTRANVTRLCQVTSTDHGRTWSSPRDLTDAAIGPAYREWSTFAVGPGHCLQLHDRARSLVVPAYAYRKLHPKQRPIPSAFCFLSHDHGRTWARGHFVAQDTLECQVAEVETGEQRVVTLNARSHLRARVQAQSTNDGLDFQESQLVKKLVEPPPQGCQGSVISFPSPRSGPGSPAQWLLYTHPTHSWQRADLGAYLNPRPPAPEAWSEPVLLAKGSAAYSDLQSMGTGPDGSPLFGCLYEANDYEEIRFIMFTLKQAFPAEYLPQ

SEQ ID NO: 85 - protein, 380 aa, Artificial Sequence
  Description of Artificial Sequence: Synthetic polypeptide
DASLPYLQKESVFQSGAHAYRIPALLYLPGQQSLLAFAEQRASKKDEHAELIVLRRGDYDANTHQVQWQAQEVVAQARLDGHRSMNPCPLYDAQTGTLFLFFIAIPGQVTEQQQLQTRANVTRLCQVTSTDHGRTWSSPRDLTDAAIGPAYREWSTFAVGPGHCLQLHDRARSLVVPAYAYRKLHPKQRPIPSAFCFLSHDHGRTWARGHFVAQDTLECQVAEVETGEQRVVTLNARSHLRARVQAQSTNDGLDFQESQLVKKLVEPPPQGCQGSVISFPSPRSGPGSPAQWLLYTHPTHSWQRADLGAYLNPRPPAPEAWSEPVLLAKGSAAYSDLQSMGTGPDGSPLFGCLYEANDYEEIVFLMFTLKQAFPAEYLPQ

SEQ ID NO: 86 - protein, 380 aa, Artificial Sequence
  Description of Artificial Sequence: Synthetic polypeptide
DASLPYLQKESVFQSGAHAYRIPALLYLPGQQSLLAFAEQRASKKDEHAELIVLRRGDYDAPTHQVQWQAQEVVAQARLDGHRSMNPCPLYDAQTGTLFLFFIAIPGQVTEQQQLQTRANVTRLCQVTSTDHGRTWSSPRDLTDAAIGPAYREWSTFAVGPGHCLQLHDRARSLVVPAYAYRKLHPKQRPIPSAFCFLSHDHGRTWARGHFVAQDTLECQVAEVETGEQRVVTLNARSHLRARVQAQSTNDGLDFQESQLVKKLVEPPPAGCQGSVISFPSPRSGPGSPAQWLLYTHPTHRKQRADLGAYLNPRPPAPEAWSEPVLLAKGSAAYSDLQSMGTGPDGSPLFGCLYEANDYEEIVFLMFTLKQAFPAEYLPQ

SEQ ID NO: 87 - protein, 380 aa, Artificial Sequence
  Description of Artificial Sequence: Synthetic polypeptide
DASLPYLQKESVFQSGAHAYRIPALLYLPGQQSLLAFAEQRASKKDEHAELIVLRRGDYDASTHQVQWQAQEVVAQARLDGHRSMNPCPLYDAQTGTLFLFFIAIPGQVTEQQQLQTRANVTRLCQVTSTDHGRTWSSPRDLTDAAIGPAYREWSTFAVGPGHCLQLHDRARSLVVPAYAYRKLHPKQRPIPSAFCFLSHDHGRTWARGHFVAQDTLECQVAEVETGEQRVVTLNARSHLRARVQAQSTNDGLDFQESQLVKKLVEPPPAGCQGSVISFPSPRSGPGSPAQWLLYTHPTHRKQRADLGAYLNPRPPAPEAWSEPVLLAKGSAAYSDLQSMGTGPDGSPLFGCLYEANDYEEIVFLMFTLKQAFPAEYLPQ

SEQ ID NO: 88 - protein, 380 aa, Artificial Sequence
  Description of Artificial Sequence: Synthetic polypeptide
DASLPYLQKESVFQSGAHAYRIPALLYLPGQQSLLAFAEQRASKKDEHAELIVLRRGDYDATTHQVQWQAQEVVAQARLDGHRSMNPCPLYDAQTGTLFLFFIAIPGQVTEQQQLQTRANVTRLCQVTSTDHGRTWSSPRDLTDAAIGPAYREWSTFAVGPGHCLQLHDRARSLVVPAYAYRKLHPKQRPIPSAFCFLSHDHGRTWARGHFVAQDTLECQVAEVETGEQRVVTLNARSHLRARVQAQSTNDGLDFQESQLVKKLVEPPPAGCQGSVISFPSPRSGPGSPAQWLLYTHPTHRKQRADLGAYLNPRPPAPEAWSEPVLLAKGSAAYSDLQSMGTGPDGSPLFGCLYEANDYEEIVFLMFTLKQAFPAEYLPQ

SEQ ID NO: 89 - protein, 380 aa, Artificial Sequence
  Description of Artificial Sequence: Synthetic polypeptide
DASLPYLQKESVFQSGAHAYRIPALLYLPGQQSLLAFAEQRASKKDEHAELIVLRRGDYDANTHQVQWQAQEVVAQARLDGHRSMNPCPLYDAQTGTLFLFFIAIPGQVTEQQQLQTRANVTRLCQVTSTDHGRTWSSPRDLTDAAIGPAYREWSTFAVGPGHCLQLHDRARSLVVPAYAYRKLHPKQRPIPSAFCFLSHDHGRTWARGHFVAQDTLECQVAEVETGEQRVVTLNARSHLRARVQAQSTNDGLDFQESQLVKKLVEPPPAGCQGSVISFPSPRSGPGSPAQWLLYTHPTHRKQRADLGAYLNPRPPAPEAWSEPVLLAKGSAAYSDLQSMGTGPDGSPLFGCLYEANDYEEIVFLMFTLKQAFPAEYLPQ

SEQ ID NO: 90 - protein, 617 aa, Artificial Sequence
  Description of Artificial Sequence: Synthetic polypeptide
DASLPYLQKESVFQSGAHAYRIPALLYLPGQQSLLAFAEQRASKKDEHAELIVLRRGDYDAGTHQVQWQAQEVVAQARLDGHRSMNPCPLYDEQTGTLFLFFIAIPGQVTEQQQLQTRANVTRLCQVTSTDHGRTWSSPRDLTDAAIGPAYREWSTFAVGPGHCLQLHDRARSLVVPAYAYRKLHPKQRPIPSAFCFLSHDHGRTWARGHFVAQDTLECQVAEVETGEQRVVTLNARSHLRARVQAQSTNDGLDFQESQLVKKLVEPPPQGCQGSVISFPSPRSGPGSPAQWLLYTHPTHSWQRADLGAYLNPRPPAPEAWSEPVLLAKGSAAYSDLQSMGTGPDGSPLFGCLYEANDYEEIVFLMFTLKQAFPAEYLPQGGGGSGGGGSDKTHTCPPCPAPELLGGPSVFLFPPKPKDTLMISRTPEVTCVVVDVSHEDPEVKFNWYVDGVEVHNAKTKPREEQYNSTYRVVSVLTVLHQDWLNGKEYKCKVSNKALPAPIEKTISKAKGQPREPQVYTLPPSREEMTKNQVSLTCLVKGFYPSDIAVEWESNGQPENNYKTTPPVLDSDGSFFLTSKLTVDKSRWQQGNVFSCSVMHEALHNHYTQKSLSLSPGK

SEQ ID NO: 91 - protein, 617 aa, Artificial Sequence
  Description of Artificial Sequence: Synthetic polypeptide
DASLPYLQDESVFQSGAHAYRIPALLYLPGQQSLLAFAEQRASKKDEHAELIVLRRGDYDAPTHQVQWQAQEVVAQARLDGHRSMNPCPLYDEQTGTLFLFFIAIPGQVTEQQQLQTRANVTRLCQVTSTDHGRTWSSPRDLTDAAIGPAYREWSTFAVGPGHCLQLHDRARSLVVPAYAYRKLHPKQRPIPSAFCFLSHDHGRTWARGHFVAQDTLECQVAEVETGEQRVVTLNARSHLRARVQAQSTNDGLDFQESQLVKKLVEPPPQGCQGSVISFPSPRSGPGSPAQWLLYTHPTHSWQRADLGAYLNPRPPAPEAWSEPVLLAKGSAAYSDLQSMGTGPDGSPLFGCLYEANDYEEIRFIMFTLKQAFPAEYLPQGGGGSGGGGSDKTHTCPPCPAPELLGGPSVFLFPPKPKDTLMISRTPEVTCVVVDVSHEDPEVKFNWYVDGVEVHNAKTKPREEQYNSTYRVVSVLTVLHQDWLNGKEYKCKVSNKALPAPIEKTISKAKGQPREPQVYTLPPSREEMTKNQVSLTCLVKGFYPSDIAVEWESNGQPENNYKTTPPVLDSDGSFFLTSKLTVDKSRWQQGNVFSCSVMHEALHNHYTQKSLSLSPGK

SEQ ID NO: 92 - protein, 617 aa, Artificial Sequence
  Description of Artificial Sequence: Synthetic polypeptide
DASLPYLQKESVFQSGAHAYRIPALLYLPGQQSLLAFAEQRASKKDEHAELIVLRRGDYDANTHQVQWQAQEVVAQARLDGHRSMNPCPLYDAQTGTLFLFFIAIPGQVTEQQQLQTRANVTRLCQVTSTDHGRTWSSPRDLTDAAIGPAYREWSTFAVGPGHCLQLHDRARSLVVPAYAYRKLHPKQRPIPSAFCFLSHDHGRTWARGHFVAQDTLECQVAEVETGEQRVVTLNARSHLRARVQAQSTNDGLDFQESQLVKKLVEPPPQGCQGSVISFPSPRSGPGSPAQWLLYTHPTHSWQRADLGAYLNPRPPAPEAWSEPVLLAKGSAAYSDLQSMGTGPDGSPLFGCLYEANDYEEIVFLMFTLKQAFPAEYLPQGGGGSGGGGSDKTHTCPPCPAPELLGGPSVFLFPPKPKDTLMISRTPEVTCVVVDVSHEDPEVKFNWYVDGVEVHNAKTKPREEQYNSTYRVVSVLTVLHQDWLNGKEYKCKVSNKALPAPIEKTISKAKGQPREPQVYTLPPSREEMTKNQVSLTCLVKGFYPSDIAVEWESNGQPENNYKTTPPVLDSDGSFFLTSKLTVDKSRWQQGNVFSCSVMHEALHNHYTQKSLSLSPGK

SEQ ID NO: 93 - protein, 617 aa, Artificial Sequence
  Description of Artificial Sequence: Synthetic polypeptide
DASLPYLQKESVFQSGAHAYRIPALLYLPGQQSLLAFAEQRASKKDEHAELIVLRRGDYDAPTHQVQWQAQEVVAQARLDGHRSMNPCPLYDAQTGTLFLFFIAIPGQVTEQQQLQTRANVTRLCQVTSTDHGRTWSSPRDLTDAAIGPAYREWSTFAVGPGHCLQLHDRARSLVVPAYAYRKLHPKQRPIPSAFCFLSHDHGRTWARGHFVAQDTLECQVAEVETGEQRVVTLNARSHLRARVQAQSTNDGLDFQESQLVKKLVEPPPAGCQGSVISFPSPRSGPGSPAQWLLYTHPTHRKQRADLGAYLNPRPPAPEAWSEPVLLAKGSAAYSDLQSMGTGPDGSPLFGCLYEANDYEEIVFLMFTLKQAFPAEYLPQGGGGSGGGGSDKTHTCPPCPAPELLGGPSVFLFPPKPKDTLMISRTPEVTCVVVDVSHEDPEVKFNWYVDGVEVHNAKTKPREEQYNSTYRVVSVLTVLHQDWLNGKEYKCKVSNKALPAPIEKTISKAKGQPREPQVYTLPPSREEMTKNQVSLTCLVKGFYPSDIAVEWESNGQPENNYKTTPPVLDSDGSFFLTSKLTVDKSRWQQGNVFSCSVMHEALHNHYTQKSLSLSPGK

SEQ ID NO: 94 - protein, 617 aa, Artificial Sequence
  Description of Artificial Sequence: Synthetic polypeptide
DASLPYLQKESVFQSGAHAYRIPALLYLPGQQSLLAFAEQRASKKDEHAELIVLRRGDYDASTHQVQWQAQEVVAQARLDGHRSMNPCPLYDAQTGTLFLFFIAIPGQVTEQQQLQTRANVTRLCQVTSTDHGRTWSSPRDLTDAAIGPAYREWSTFAVGPGHCLQLHDRARSLVVPAYAYRKLHPKQRPIPSAFCFLSHDHGRTWARGHFVAQDTLECQVAEVETGEQRVVTLNARSHLRARVQAQSTNDGLDFQESQLVKKLVEPPPAGCQGSVISFPSPRSGPGSPAQWLLYTHPTHRKQRADLGAYLNPRPPAPEAWSEPVLLAKGSAAYSDLQSMGTGPDGSPLFGCLYEANDYEEIVFLMFTLKQAFPAEYLPQGGGGSGGGGSDKTHTCPPCPAPELLGGPSVFLFPPKPKDTLMISRTPEVTCVVVDVSHEDPEVKFNWYVDGVEVHNAKTKPREEQYNSTYRVVSVLTVLHQDWLNGKEYKCKVSNKALPAPIEKTISKAKGQPREPQVYTLPPSREEMTKNQVSLTCLVKGFYPSDIAVEWESNGQPENNYKTTPPVLDSDGSFFLTSKLTVDKSRWQQGNVFSCSVMHEALHNHYTQKSLSLSPGK

SEQ ID NO: 95 - protein, 617 aa, Artificial Sequence
  Description of Artificial Sequence: Synthetic polypeptide
DASLPYLQKESVFQSGAHAYRIPALLYLPGQQSLLAFAEQRASKKDEHAELIVLRRGDYDATTHQVQWQAQEVVAQARLDGHRSMNPCPLYDAQTGTLFLFFIAIPGQVTEQQQLQTRANVTRLCQVTSTDHGRTWSSPRDLTDAAIGPAYREWSTFAVGPGHCLQLHDRARSLVVPAYAYRKLHPKQRPIPSAFCFLSHDHGRTWARGHFVAQDTLECQVAEVETGEQRVVTLNARSHLRARVQAQSTNDGLDFQESQLVKKLVEPPPAGCQGSVISFPSPRSGPGSPAQWLLYTHPTHRKQRADLGAYLNPRPPAPEAWSEPVLLAKGSAAYSDLQSMGTGPDGSPLFGCLYEANDYEEIVFLMFTLKQAFPAEYLPQGGGGSGGGGSDKTHTCPPCPAPELLGGPSVFLFPPKPKDTLMISRTPEVTCVVVDVSHEDPEVKFNWYVDGVEVHNAKTKPREEQYNSTYRVVSVLTVLHQDWLNGKEYKCKVSNKALPAPIEKTISKAKGQPREPQVYTLPPSREEMTKNQVSLTCLVKGFYPSDIAVEWESNGQPENNYKTTPPVLDSDGSFFLTSKLTVDKSRWQQGNVFSCSVMHEALHNHYTQKSLSLSPGK

SEQ ID NO: 96 - protein, 617 aa, Artificial Sequence
  Description of Artificial Sequence: Synthetic polypeptide
DASLPYLQKESVFQSGAHAYRIPALLYLPGQQSLLAFAEQRASKKDEHAELIVLRRGDYDANTHQVQWQAQEVVAQARLDGHRSMNPCPLYDAQTGTLFLFFIAIPGQVTEQQQLQTRANVTRLCQVTSTDHGRTWSSPRDLTDAAIGPAYREWSTFAVGPGHCLQLHDRARSLVVPAYAYRKLHPKQRPIPSAFCFLSHDHGRTWARGHFVAQDTLECQVAEVETGEQRVVTLNARSHLRARVQAQSTNDGLDFQESQLVKKLVEPPPAGCQGSVISFPSPRSGPGSPAQWLLYTHPTHRKQRADLGAYLNPRPPAPEAWSEPVLLAKGSAAYSDLQSMGTGPDGSPLFGCLYEANDYEEIVFLMFTLKQAFPAEYLPQGGGGSGGGGSDKTHTCPPCPAPELLGGPSVFLFPPKPKDTLMISRTPEVTCVVVDVSHEDPEVKFNWYVDGVEVHNAKTKPREEQYNSTYRVVSVLTVLHQDWLNGKEYKCKVSNKALPAPIEKTISKAKGQPREPQVYTLPPSREEMTKNQVSLTCLVKGFYPSDIAVEWESNGQPENNYKTTPPVLDSDGSFFLTSKLTVDKSRWQQGNVFSCSVMHEALHNHYTQKSLSLSPGK

SEQ ID NO: 97 - protein, 617 aa, Artificial Sequence
  Description of Artificial Sequence: Synthetic polypeptide
  MOD_RES (1)..(1): Ala, Arg, Asn, Asp, Gln, Glu, Gly, His, Leu, Lys, Met, Phe, Thr, Val, or not present
  MOD_RES (6)..(6): Phe, Trp, Tyr or Val
  MOD_RES (9)..(9): Lys or Asp
  MOD_RES (62)..(62): Pro, Asn, Asp, His, Glu, Gly, Ser or Thr
  MOD_RES (93)..(93): Ala, Glu, or Lys
  MOD_RES (187)..(187): Arg, Ile, or Lys
  MOD_RES (270)..(270): Gln, Ala, His, Phe, or Pro
  MOD_RES (301)..(301): Ser or Arg
  MOD_RES (302)..(302): Trp or Lys
  MOD_RES (332)..(332): Ala, Cys, Ser, or Val
  MOD_RES (363)..(363): Val or Arg
  MOD_RES (365)..(365): Leu, Gln, His, Ile, Lys, or Ser
  MOD_RES (381)..(390): This region may encompass one of the following sequences: "GGGGSGGGGS" or "EPKSS"
XASLPXLQXESVFQSGAHAYRIPALLYLPGQQSLLAFAEQRASKKDEHAELIVLRRGDYDAXTHQVQWQAQEVVAQARLDGHRSMNPCPLYDXQTGTLFLFFIAIPGQVTEQQQLQTRANVTRLCQVTSTDHGRTWSSPRDLTDAAIGPAYREWSTFAVGPGHCLQLHDRARSLVVPAYAYRKLHPXQRPIPSAFCFLSHDHGRTWARGHFVAQDTLECQVAEVETGEQRVVTLNARSHLRARVQAQSTNDGLDFQESQLVKKLVEPPPXGCQGSVISFPSPRSGPGSPAQWLLYTHPTHXXQRADLGAYLNPRPPAPEAWSEPVLLAKGSXAYSDLQSMGTGPDGSPLFGCLYEANDYEEIXFXMFTLKQAFPAEYLPQXXXXXXXXXXDKTHTCPPCPAPELLGGPSVFLFPPKPKDTLMISRTPEVTCVVVDVSHEDPEVKFNWYVDGVEVHNAKTKPREEQYNSTYRVVSVLTVLHQDWLNGKEYKCKVSNKALPAPIEKTISKAKGQPREPQVYTLPPSREEMTKNQVSLTCLVKGFYPSDIAVEWESNGQPENNYKTTPPVLDSDGSFFLTSKLTVDKSRWQQGNVFSCSVMHEALHNHYTQKSLSLSPGK

SEQ ID NO: 98 - protein, 617 aa, Artificial Sequence
  Description of Artificial Sequence: Synthetic polypeptide
  MOD_RES (1)..(1): Ala, Arg, Asn, Asp, Gln, Glu, Gly, His, Leu, Lys, Met, Phe, Thr, Val, or not present
  MOD_RES (2)..(2): Ala or Lys
  MOD_RES (4)..(4): Asn or Leu
  MOD_RES (5)..(5): Pro or His
  MOD_RES (6)..(6): Phe, Trp, Tyr or Val
  MOD_RES (9)..(9): Lys or Asp
  MOD_RES (44)..(44): Lys, Arg, or Glu
  MOD_RES (45)..(45): Lys, Ala, Arg, or Glu
  MOD_RES (54)..(54): Leu or Met
  MOD_RES (62)..(62): Pro, Asn, Asp, His, Glu, Gly, Ser or Thr
  MOD_RES (69)..(69): Gln or His
  MOD_RES (78)..(78): Arg or Lys
  MOD_RES (93)..(93): Ala, Glu or Lys
  MOD_RES (107)..(107): Gly or Asp
  MOD_RES (108)..(108): Gln or His
  MOD_RES (112)..(112): Gln, Arg, or Lys
  MOD_RES (125)..(125): Ala, Cys, Ile, Ser, Val, or Leu
  MOD_RES (126)..(126): Gln or Leu
  MOD_RES (150)..(150): Ala or Val
  MOD_RES (164)..(164): Cys or Gly
  MOD_RES (171)..(171): Ala or Gly
  MOD_RES (187)..(187): Arg, Ile, or Lys
  MOD_RES (196)..(196): Ala, Cys, Leu, or Val
  MOD_RES (217)..(217): Leu, Ala, or Val
  MOD_RES (249)..(249): Thr or Ala
  MOD_RES (251)..(251): Asp or Gly
  MOD_RES (257)..(257): Glu or Lys
  MOD_RES (270)..(270): Gln, Ala, His, Phe, or Pro
  MOD_RES (272)..(272): Cys or Val
  MOD_RES (292)..(292): Trp or Arg
  MOD_RES (301)..(301): Ser or Arg
  MOD_RES (302)..(302): Trp or Lys
  MOD_RES (325)..(325): Lys or Val
  MOD_RES (332)..(332): Ala, Cys, Ser, or Val
  MOD_RES (352)..(352): Cys, Leu, or Val
  MOD_RES (363)..(363): Val or Arg
  MOD_RES (365)..(365): Leu, Gln, His, Ile, Lys, or Ser
  MOD_RES (381)..(390): This region may encompass one of the following sequences: "GGGGSGGGGS" or "EPKSS"
XXSXXXLQXESVFQSGAHAYRIPALLYLPGQQSLLAFAEQRASXXDEHAELIVXRRGDYDAXTHQVQWXAQEVVAQAXLDGHRSMNPCPLYDXQTGTLFLFFIAIPXXVTEXQQLQTRANVTRLXXVTSTDHGRTWSSPRDLTDAAIGPXYREWSTFAVGPGHXLQLHDRXRSLVVPAYAYRKLHPXQRPIPSAFXFLSHDHGRTWARGHFVAQDTXECQVAEVETGEQRVVTLNARSHLRARVQAQSXNXGLDFQXSQLVKKLVEPPPXGXQGSVISFPSPRSGPGSPAQXLLYTHPTHXXQRADLGAYLNPRPPAPEAWSEPXLLAKGSXAYSDLQSMGTGPDGSPLFGXLYEANDYEEIXFXMFTLKQAFPAEYLPQXXXXXXXXXXDKTHTCPPCPAPELLGGPSVFLFPPKPKDTLMISRTPEVTCVVVDVSHEDPEVKFNWYVDGVEVHNAKTKPREEQYNSTYRVVSVLTVLHQDWLNGKEYKCKVSNKALPAPIEKTISKAKGQPREPQVYTLPPSREEMTKNQVSLTCLVKGFYPSDIAVEWESNGQPENNYKTTPPVLDSDGSFFLTSKLTVDKSRWQQGNVFSCSVMHEALHNHYTQKSLSLSPGK

SEQ ID NO: 99 - protein, 874 aa, Artificial Sequence
  Description of Artificial Sequence: Synthetic polypeptide
DASLPYLQKESVFQSGAHAYRIPALLYLPGQQSLLAFAEQRASKKDEHAELIVLRRGDYDAGTHQVQWQAQEVVAQARLDGHRSMNPCPLYDEQTGTLFLFFIAIPGQVTEQQQLQTRANVTRLCQVTSTDHGRTWSSPRDLTDAAIGPAYREWSTFAVGPGHCLQLHDRARSLVVPAYAYRKLHPKQRPIPSAFCFLSHDHGRTWARGHFVAQDTLECQVAEVETGEQRVVTLNARSHLRARVQAQSTNDGLDFQESQLVKKLVEPPPQGCQGSVISFPSPRSGPGSPAQWLLYTHPTHSWQRADLGAYLNPRPPAPEAWSEPVLLAKGSAAYSDLQSMGTGPDGSPLFGCLYEANDYEEIVFLMFTLKQAFPAEYLPQGGGGSGGGGSDKTHTCPPCPAPELLGGPSVFLFPPKPKDTLMISRTPEVTCVVVDVSHEDPEVKFNWYVDGVEVHNAKTKPREEQYNSTYRVVSVLTVLHQDWLNGKEYKCKVSNKALPAPIEKTISKAKGQPREPQVYTLPPSREEMTKNQVSLTCLVKGFYPSDIAVEWESNGQPENNYKTTPPVLDSDGSFFLYSKLTVDKSRWQQGNVFSCSVMHEALHNHYTQKSLSLSPGKGGGGSGGGGSGGGGSEVQLVESGGGLVQPGGSLRLSCAASGFNIKDTYIHWVRQAPGKGLEWVARIYPTNGYTRYADSVKGRFTISADTSKNTAYLQMNSLRAEDTAVYYCSRWGGDGFYAMDYWGQGTLVTVSSGGGGSGGGGSGGGGSDIQMTQSPSSLSASVGDRVTITCRASQDVNTAVAWYQQKPGKAPKLLIYSASFLYSGVPSRFSGSRSGTDFTLTISSLQPEDFATYYCQQHYTTPPTFGQGTKVEIK

SEQ ID NO: 100 - protein, 874 aa, Artificial Sequence
  Description of Artificial Sequence: Synthetic polypeptide
DASLPYLQDESVFQSGAHAYRIPALLYLPGQQSLLAFAEQRASKKDEHAELIVLRRGDYDAPTHQVQWQAQEVVAQARLDGHRSMNPCPLYDEQTGTLFLFFIAIPGQVTEQQQLQTRANVTRLCQVTSTDHGRTWSSPRDLTDAAIGPAYREWSTFAVGPGHCLQLHDRARSLVVPAYAYRKLHPKQRPIPSAFCFLSHDHGRTWARGHFVAQDTLECQVAEVETGEQRVVTLNARSHLRARVQAQSTNDGLDFQESQLVKKLVEPPPQGCQGSVISFPSPRSGPGSPAQWLLYTHPTHSWQRADLGAYLNPRPPAPEAWSEPVLLAKGSAAYSDLQSMGTGPDGSPLFGCLYEANDYEEIRFIMFTLKQAFPAEYLPQGGGGSGGGGSDKTHTCPPCPAPELLGGPSVFLFPPKPKDTLMISRTPEVTCVVVDVSHEDPEVKFNWYVDGVEVHNAKTKPREEQYNSTYRVVSVLTVLHQDWLNGKEYKCKVSNKALPAPIEKTISKAKGQPREPQVYTLPPSREEMTKNQVSLTCLVKGFYPSDIAVEWESNGQPENNYKTTPPVLDSDGSFFLYSKLTVDKSRWQQGNVFSCSVMHEALHNHYTQKSLSLSPGKGGGGSGGGGSGGGGSEVQLVESGGGLVQPGGSLRLSCAASGFNIKDTYIHWVRQAPGKGLEWVARIYPTNGYTRYADSVKGRFTISADTSKNTAYLQMNSLRAEDTAVYYCSRWGGDGFYAMDYWGQGTLVTVSSGGGGSGGGGSGGGGSDIQMTQSPSSLSASVGDRVTITCRASQDVNTAVAWYQQKPGKAPKLLIYSASFLYSGVPSRFSGSRSGTDFTLTISSLQPEDFATYYCQQHYTTPPTFGQGTKVEIK

SEQ ID NO: 101 - protein, 874 aa, Artificial Sequence
  Description of Artificial Sequence: Synthetic polypeptide
DASLPYLQKESVFQSGAHAYRIPALLYLPGQQSLLAFAEQRASKKDEHAELIVLRRGDYDANTHQVQWQAQEVVAQARLDGHRSMNPCPLYDAQTGTLFLFFIAIPGQVTEQQQLQTRANVTRLCQVTSTDHGRTWSSPRDLTDAAIGPAYREWSTFAVGPGHCLQLHDRARSLVVPAYAYRKLHPKQRPIPSAFCFLSHDHGRTWARGHFVAQDTLECQVAEVETGEQRVVTLNARSHLRARVQAQSTNDGLDFQESQLVKKLVEPPPQGCQGSVISFPSPRSGPGSPAQWLLYTHPTHSWQRADLGAYLNPRPPAPEAWSEPVLLAKGSAAYSDLQSMGTGPDGSPLFGCLYEANDYEEIVFLMFTLKQAFPAEYLPQGGGGSGGGGSDKTHTCPPCPAPELLGGPSVFLFPPKPKDTLMISRTPEVTCVVVDVSHEDPEVKFNWYVDGVEVHNAKTKPREEQYNSTYRVVSVLTVLHQDWLNGKEYKCKVSNKALPAPIEKTISKAKGQPREPQVYTLPPSREEMTKNQVSLTCLVKGFYPSDIAVEWESNGQPENNYKTTPPVLDSDGSFFLYSKLTVDKSRWQQGNVFSCSVMHEALHNHYTQKSLSLSPGKGGGGSGGGGSGGGGSEVQLVESGGGLVQPGGSLRLSCAASGFNIKDTYIHWVRQAPGKGLEWVARIYPTNGYTRYADSVKGRFTISADTSKNTAYLQMNSLRAEDTAVYYCSRWGGDGFYAMDYWGQGTLVTVSSGGGGSGGGGSGGGGSDIQMTQSPSSLSASVGDRVTITCRASQDVNTAVAWYQQKPGKAPKLLIYSASFLYSGVPSRFSGSRSGTDFTLTISSLQPEDFATYYCQQHYTTPPTFGQGTKVEIK

SEQ ID NO: 102 - protein, 874 aa, Artificial Sequence
  Description of Artificial Sequence: Synthetic polypeptide
DASLPYLQKESVFQSGAHAYRIPALLYLPGQQSLLAFAEQRASKKDEHAELIVLRRGDYDAPTHQVQWQAQEVVAQARLDGHRSMNPCPLYDAQTGTLFLFFIAIPGQVTEQQQLQTRANVTRLCQVTSTDHGRTWSSPRDLTDAAIGPAYREWSTFAVGPGHCLQLHDRARSLVVPAYAYRKLHPKQRPIPSAFCFLSHDHGRTWARGHFVAQDTLECQVAEVETGEQRVVTLNARSHLRARVQAQSTNDGLDFQESQLVKKLVEPPPAGCQGSVISFPSPRSGPGSPAQWLLYTHPTHRKQRADLGAYLNPRPPAPEAWSEPVLLAKGSAAYSDLQSMGTGPDGSPLFGCLYEANDYEEIVFLMFTLKQAFPAEYLPQGGGGSGGGGSDKTHTCPPCPAPELLGGPSVFLFPPKPKDTLMISRTPEVTCVVVDVSHEDPEVKFNWYVDGVEVHNAKTKPREEQYNSTYRVVSVLTVLHQDWLNGKEYKCKVSNKALPAPIEKTISKAKGQPREPQVYTLPPSREEMTKNQVSLTCLVKGFYPSDIAVEWESNGQPENNYKTTPPVLDSDGSFFLYSKLTVDKSRWQQGNVFSCSVMHEALHNHYTQKSLSLSPGKGGGGSGGGGSGGGGSEVQLVESGGGLVQPGGSLRLSCAASGFNIKDTYIHWVRQAPGKGLEWVARIYPTNGYTRYADSVKGRFTISADTSKNTAYLQMNSLRAEDTAVYYCSRWGGDGFYAMDYWGQGTLVTVSSGGGGSGGGGSGGGGSDIQMTQSPSSLSASVGDRVTITCRASQDVNTAVAWYQQKPGKAPKLLIYSASFLYSGVPSRFSGSRSGTDFTLTISSLQPEDFATYYCQQHYTTPPTFGQGTKVEIK

SEQ ID NO: 103 - protein, 874 aa, Artificial Sequence
  Description of Artificial Sequence: Synthetic polypeptide
DASLPYLQKESVFQSGAHAYRIPALLYLPGQQSLLAFAEQRASKKDEHAELIVLRRGDYDASTHQVQWQAQEVVAQARLDGHRSMNPCPLYDAQTGTLFLFFIAIPGQVTEQQQLQTRANVTRLCQVTSTDHGRTWSSPRDLTDAAIGPAYREWSTFAVGPGHCLQLHDRARSLVVPAYAYRKLHPKQRPIPSAFCFLSHDHGRTWARGHFVAQDTLECQVAEVETGEQRVVTLNARSHLRARVQAQSTNDGLDFQESQLVKKLVEPPPAGCQGSVISFPSPRSGPGSPAQWLLYTHPTHRKQRADLGAYLNPRPPAPEAWSEPVLLAKGSAAYSDLQSMGTGPDGSPLFGCLYEANDYEEIVFLMFTLKQAFPAEYLPQGGGGSGGGGSDKTHTCPPCPAPELLGGPSVFLFPPKPKDTLMISRTPEVTCVVVDVSHEDPEVKFNWYVDGVEVHNAKTKPREEQYNSTYRVVSVLTVLHQDWLNGKEYKCKVSNKALPAPIEKTISKAKGQPREPQVYTLPPSREEMTKNQVSLTCLVKGFYPSDIAVEWESNGQPENNYKTTPPVLDSDGSFFLYSKLTVDKSRWQQGNVFSCSVMHEALHNHYTQKSLSLSPGKGGGGSGGGGSGGGGSEVQLVESGGGLVQPGGSLRLSCAASGFNIKDTYIHWVRQAPGKGLEWVARIYPTNGYTRYADSVKGRFTISADTSKNTAYLQMNSLRAEDTAVYYCSRWGGDGFYAMDYWGQGTLVTVSSGGGGSGGGGSGGGGSDIQMTQSPSSLSASVGDRVTITCRASQDVNTAVAWYQQKPGKAPKLLIYSASFLYSGVPSRFSGSRSGTDFTLTISSLQPEDFATYYCQQHYTTPPTFGQGTKVEIK

SEQ ID NO: 104 - protein, 874 aa, Artificial Sequence
  Description of Artificial Sequence: Synthetic polypeptide
DASLPYLQKESVFQSGAHAYRIPALLYLPGQQSLLAFAEQRASKKDEHAELIVLRRGDYDATTHQVQWQAQEVVAQARLDGHRSMNPCPLYDAQTGTLFLFFIAIPGQVTEQQQLQTRANVTRLCQVTSTDHGRTWSSPRDLTDAAIGPAYREWSTFAVGPGHCLQLHDRARSLVVPAYAYRKLHPKQRPIPSAFCFLSHDHGRTWARGHFVAQDTLECQVAEVETGEQRVVTLNARSHLRARVQAQSTNDGLDFQESQLVKKLVEPPPAGCQGSVISFPSPRSGPGSPAQWLLYTHPTHRKQRADLGAYLNPRPPAPEAWSEPVLLAKGSAAYSDLQSMGTGPDGSPLFGCLYEANDYEEIVFLMFTLKQAFPAEYLPQGGGGSGGGGSDKTHTCPPCPAPELLGGPSVFLFPPKPKDTLMISRTPEVTCVVVDVSHEDPEVKFNWYVDGVEVHNAKTKPREEQYNSTYRVVSVLTVLHQDWLNGKEYKCKVSNKALPAPIEKTISKAKGQPREPQVYTLPPSREEMTKNQVSLTCLVKGFYPSDIAVEWESNGQPENNYKTTPPVLDSDGSFFLYSKLTVDKSRWQQGNVFSCSVMHEALHNHYTQKSLSLSPGKGGGGSGGGGSGGGGSEVQLVESGGGLVQPGGSLRLSCAASGFNIKDTYIHWVRQAPGKGLEWVARIYPTNGYTRYADSVKGRFTISADTSKNTAYLQMNSLRAEDTAVYYCSRWGGDGFYAMDYWGQGTLVTVSSGGGGSGGGGSGGGGSDIQMTQSPSSLSASVGDRVTITCRASQDVNTAVAWYQQKPGKAPKLLIYSASFLYSGVPSRFSGSRSGTDFTLTISSLQPEDFATYYCQQHYTTPPTFGQGTKVEIK

SEQ ID NO: 105 - protein, 874 aa, Artificial Sequence
  Description of Artificial Sequence: Synthetic polypeptide
DASLPYLQKESVFQSGAHAYRIPALLYLPGQQSLLAFAEQRASKKDEHAELIVLRRGDYDANTHQVQWQAQEVVAQARLDGHRSMNPCPLYDAQTGTLFLFFIAIPGQVTEQQQLQTRANVTRLCQVTSTDHGRTWSSPRDLTDAAIGPAYREWSTFAVGPGHCLQLHDRARSLVVPAYAYRKLHPKQRPIPSAFCFLSHDHGRTWARGHFVAQDTLECQVAEVETGEQRVVTLNARSHLRARVQAQSTNDGLDFQESQLVKKLVEPPPAGCQGSVISFPSPRSGPGSPAQWLLYTHPTHRKQRADLGAYLNPRPPAPEAWSEPVLLAKGSAAYSDLQSMGTGPDGSPLFGCLYEANDYEEIVFLMFTLKQAFPAEYLPQGGGGSGGGGSDKTHTCPPCPAPELLGGPSVFLFPPKPKDTLMISRTPEVTCVVVDVSHEDPEVKFNWYVDGVEVHNAKTKPREEQYNSTYRVVSVLTVLHQDWLNGKEYKCKVSNKALPAPIEKTISKAKGQPREPQVYTLPPSREEMTKNQVSLTCLVKGFYPSDIAVEWESNGQPENNYKTTPPVLDSDGSFFLYSKLTVDKSRWQQGNVFSCSVMHEALHNHYTQKSLSLSPGKGGGGSGGGGSGGGGSEVQLVESGGGLVQPGGSLRLSCAASGFNIKDTYIHWVRQAPGKGLEWVARIYPTNGYTRYADSVKGRFTISADTSKNTAYLQMNSLRAEDTAVYYCSRWGGDGFYAMDYWGQGTLVTVSSGGGGSGGGGSGGGGSDIQMTQSPSSLSASVGDRVTITCRASQDVNTAVAWYQQKPGKAPKLLIYSASFLYSGVPSRFSGSRSGTDFTLTISSLQPEDFATYYCQQHYTTPPTFGQGTKVEIK

SEQ ID NO: 106 - protein, 874 aa, Artificial Sequence
  Description of Artificial Sequence: Synthetic polypeptide
  MOD_RES (1)..(1): Ala, Arg, Asn, Asp, Gln, Glu, Gly, His, Leu, Lys, Met, Phe, Thr, Val, or not present
  MOD_RES (6)..(6): Phe, Trp, Tyr or Val
  MOD_RES (9)..(9): Lys or Asp
  MOD_RES (62)..(62): Pro, Asn, Asp, His, Glu, Gly, Ser or Thr
  MOD_RES (93)..(93): Ala, Glu, or Lys
  MOD_RES (187)..(187): Arg, Ile, or Lys
  MOD_RES (270)..(270): Gln, Ala, His, Phe, or Pro
  MOD_RES (301)..(301): Ser or Arg
  MOD_RES (302)..(302): Trp or Lys
  MOD_RES (332)..(332): Ala, Cys, Ser, or Val
  MOD_RES (363)..(363): Val or Arg
  MOD_RES (365)..(365): Leu, Gln, His, Ile, Lys, or Ser
XASLPXLQXESVFQSGAHAYRIPALLYLPGQQSLLAFAEQRASKKDEHAELIVLRRGDYDAXTHQVQWQAQEVVAQARLDGHRSMNPCPLYDXQTGTLFLFFIAIPGQVTEQQQLQTRANVTRLCQVTSTDHGRTWSSPRDLTDAAIGPAYREWSTFAVGPGHCLQLHDRARSLVVPAYAYRKLHPXQRPIPSAFCFLSHDHGRTWARGHFVAQDTLECQVAEVETGEQRVVTLNARSHLRARVQAQSTNDGLDFQESQLVKKLVEPPPXGCQGSVISFPSPRSGPGSPAQWLLYTHPTHXXQRADLGAYLNPRPPAPEAWSEPVLLAKGSXAYSDLQSMGTGPDGSPLFGCLYEANDYEEIXFXMFTLKQAFPAEYLPQGGGGSGGGGSDKTHTCPPCPAPELLGGPSVFLFPPKPKDTLMISRTPEVTCVVVDVSHEDPEVKFNWYVDGVEVHNAKTKPREEQYNSTYRVVSVLTVLHQDWLNGKEYKCKVSNKALPAPIEKTISKAKGQPREPQVYTLPPSREEMTKNQVSLTCLVKGFYPSDIAVEWESNGQPENNYKTTPPVLDSDGSFFLYSKLTVDKSRWQQGNVFSCSVMHEALHNHYTQKSLSLSPGKGGGGSGGGGSGGGGSEVQLVESGGGLVQPGGSLRLSCAASGFNIKDTYIHWVRQAPGKGLEWVARIYPTNGYTRYADSVKGRFTISADTSKNTAYLQMNSLRAEDTAVYYCSRWGGDGFYAMDYWGQGTLVTVSSGGGGSGGGGSGGGGSDIQMTQSPSSLSASVGDRVTITCRASQDVNTAVAWYQQKPGKAPKLLIYSASFLYSGVPSRFSGSRSGTDFTLTISSLQPEDFATYYCQQHYTTPPTFGQGTKVEIK

SEQ ID NO: 107 - protein, 874 aa, Artificial Sequence
  Description of Artificial Sequence: Synthetic polypeptide
  MOD_RES (1)..(1): Ala, Arg, Asn, Asp, Gln, Glu, Gly, His, Leu, Lys, Met, Phe, Thr, Val, or not present
  MOD_RES (2)..(2): Ala or Lys
  MOD_RES (4)..(4): Asn or Leu
  MOD_RES (5)..(5): Pro or His
  MOD_RES (6)..(6): Phe, Trp, Tyr or Val
  MOD_RES (9)..(9): Lys or Asp
  MOD_RES (44)..(44): Lys, Arg, or Glu
  MOD_RES (45)..(45): Lys, Ala, Arg, or Glu
  MOD_RES (54)..(54): Leu or Met
  MOD_RES (62)..(62): Pro, Asn, Asp, His, Glu, Gly, Ser or Thr
  MOD_RES (69)..(69): Gln or His
  MOD_RES (78)..(78): Arg or Lys
  MOD_RES (93)..(93): Ala, Glu or Lys
  MOD_RES (107)..(107): Gly or Asp
  MOD_RES (108)..(108): Gln or His
  MOD_RES (112)..(112): Gln, Arg, or Lys
  MOD_RES (125)..(125): Ala, Cys, Ile, Ser, Val, or Leu
  MOD_RES (126)..(126): Gln or Leu
  MOD_RES (150)..(150): Ala or Val
  MOD_RES (164)..(164): Cys or Gly
  MOD_RES (171)..(171): Ala or Gly
  MOD_RES (187)..(187): Arg, Ile, or Lys
  MOD_RES (196)..(196): Ala, Cys, Leu, or Val
  MOD_RES (217)..(217): Leu, Ala, or Val
  MOD_RES (249)..(249): Thr or Ala
  MOD_RES (251)..(251): Asp or Gly
  MOD_RES (257)..(257): Glu or Lys
  MOD_RES (270)..(270): Gln, Ala, His, Phe, or Pro
  MOD_RES (272)..(272): Cys or Val
  MOD_RES (292)..(292): Trp or Arg
  MOD_RES (301)..(301): Ser or Arg
  MOD_RES (302)..(302): Trp or Lys
  MOD_RES (325)..(325): Lys or Val
  MOD_RES (332)..(332): Ala, Cys, Ser, or Val
  MOD_RES (352)..(352): Cys, Leu, or Val
  MOD_RES (363)..(363): Val or Arg
  MOD_RES (365)..(365): Leu, Gln, His, Ile, Lys, or Ser
XXSXXXLQXESVFQSGAHAYRIPALLYLPGQQSLLAFAEQRASXXDEHAELIVXRRGDYDAXTHQVQWXAQEVVAQAXLDGHRSMNPCPLYDXQTGTLFLFFIAIPXXVTEXQQLQTRANVTRLXXVTSTDHGRTWSSPRDLTDAAIGPXYREWSTFAVGPGHXLQLHDRXRSLVVPAYAYRKLHPXQRPIPSAFXFLSHDHGRTWARGHFVAQDTXECQVAEVETGEQRVVTLNARSHLRARVQAQSXNXGLDFQXSQLVKKLVEPPPXGXQGSVISFPSPRSGPGSPAQXLLYTHPTHXXQRADLGAYLNPRPPAPEAWSEPXLLAKGSXAYSDLQSMGTGPDGSPLFGXLYEANDYEEIXFXMFTLKQAFPAEYLPQGGGGSGGGGSDKTHTCPPCPAPELLGGPSVFLFPPKPKDTLMISRTPEVTCVVVDVSHEDPEVKFNWYVDGVEVHNAKTKPREEQYNSTYRVVSVLTVLHQDWLNGKEYKCKVSNKALPAPIEKTISKAKGQPREPQVYTLPPSREEMTKNQVSLTCLVKGFYPSDIAVEWESNGQPENNYKTTPPVLDSDGSFFLYSKLTVDKSRWQQGNVFSCSVMHEALHNHYTQKSLSLSPGKGGGGSGGGGSGGGGSEVQLVESGGGLVQPGGSLRLSCAASGFNIKDTYIHWVRQAPGKGLEWVARIYPTNGYTRYADSVKGRFTISADTSKNTAYLQMNSLRAEDTAVYYCSRWGGDGFYAMDYWGQGTLVTVSSGGGGSGGGGSGGGGSDIQMTQSPSSLSASVGDRVTITCRASQDVNTAVAWYQQKPGKAPKLLIYSASFLYSGVPSRFSGSRSGTDFTLTISSLQPEDFATYYCQQHYTTPPTFGQGTKVEIK

SEQ ID NO: 108 - protein, 618 aa, Artificial Sequence
  Description of Artificial Sequence: Synthetic polypeptide
TVEKSVVFKAEGEHFTDQKGNTIVGSGSGGTTKYFRIPAMCTTSKGTIVVFADARHNTASDQSFIDTAAARSTDGGKTWNKKIAIYNDRVNSKLSRVMDPTCIVANIQGRETILVMVGKWNNNDKTWGAYRDKAPDTDWDLVLYKSTDDGVTFSKVETNIHDIVTKNGTISAMLGGVGSGLQLNDGKLVFPVQMVRTKNITTVLNTSFIYSTDGITWSLPSGYCEGFGSENNIIEFNASLVNNIRNSGLRRSFETKDFGKTWTEFPPMDKKVDNRNHGVQGSTITIPSGNKLVAAHSSAQNKNNDYTRSDISLYAHNLYSGEVKLIDDFYPKVGNASGAGYSCLSYRKNVDKETLYVVYEANGSIEFQDLSRHLPVIKSYNGGGGSGGGGSDKTHTCPPCPAPELLGGPSVFLFPPKPKDTLMISRTPEVTCVVVDVSHEDPEVKFNWYVDGVEVHNAKTKPREEQYNSTYRVVSVLTVLHQDWLNGKEYKCKVSNKALPAPIEKTISKAKGQPREPQVYTLPPSREEMTKNQVSLTCLVKGFYPSDIAVEWESNGQPENNYKTTPPVLDSDGSFFLTSKLTVDKSRWQQGNVFSCSVMHEALHNHYTQKSLSLSPGK

SEQ ID NO: 109 - protein, 846 aa, Artificial Sequence
  Description of Artificial Sequence: Synthetic polypeptide
EVQLVESGGGLVQPGGSLRLSCAASGFNIKDTYIHWVRQAPGKGLEWVARIYPTNGYTRYADSVKGRFTISADTSKNTAYLQMNSLRAEDTAVYYCSRWGGDGFYAMDYWGQGTLVTVSSASTKGPSVFPLAPSSKSTSGGTAALGCLVKDYFPEPVTVSWNSGALTSGVHTFPAVLQSSGLYSLSSVVTVPSSSLGTQTYICNVNHKPSNTKVDKKVEPKSCDKTHTCPPCPAPELLGGPSVFLFPPKPKDTLMISRTPEVTCVVVDVSHEDPEVKFNWYVDGVEVHNAKTKPREEQYNSTYRVVSVLTVLHQDWLNGKEYKCKVSNKALPAPIEKTISKAKGQPREPQVYTLPPSREEMTKNQVSLTCLVKGFYPSDIAVEWESNGQPENNYKTTPPVLDSDGSFFLYSKLTVDKSRWQQGNVFSCSVMHEALHNHYTQKSLSLSPGKGGGGSGGGGSGGGGSTVEKSVVFKAEGEHFTDQKGNTIVGSGSGGTTKYFRIPAMCTTSKGTIVVFADARHNTASDQSFIDTAAARSTDGGKTWNKKIAIYNDRVNSKLSRVMDPTCIVANIQGRETILVMVGKWNNNDKTWGAYRDKAPDTDWDLVLYKSTDDGVTFSKVETNIHDIVTKNGTISAMLGGVGSGLQLNDGKLVFPVQMVRTKNITTVLNTSFIYSTDGITWSLPSGYCEGFGSENNIIEFNASLVNNIRNSGLRRSFETKDFGKTWTEFPPMDKKVDNRNHGVQGSTITIPSGNKLVAAHSSAQNKNNDYTRSDISLYAHNLYSGEVKLIDDFYPKVGNASGAGYSCLSYRKNVDKETLYVVYEANGSIEFQDLSRHLPVIKSYN

SEQ ID NO: 110 - protein, 875 aa, Artificial Sequence
  Description of Artificial Sequence: Synthetic polypeptide
TVEKSVVFKAEGEHFTDQKGNTIVGSGSGGTTKYFRIPAMCTTSKGTIVVFADARHNTASDQSFIDTAAARSTDGGKTWNKKIAIYNDRVNSKLSRVMDPTCIVANIQGRETILVMVGKWNNNDKTWGAYRDKAPDTDWDLVLYKSTDDGVTFSKVETNIHDIVTKNGTISAMLGGVGSGLQLNDGKLVFPVQMVRTKNITTVLNTSFIYSTDGITWSLPSGYCEGFGSENNIIEFNASLVNNIRNSGLRRSFETKDFGKTWTEFPPMDKKVDNRNHGVQGSTITIPSGNKLVAAHSSAQNKNNDYTRSDISLYAHNLYSGEVKLIDDFYPKVGNASGAGYSCLSYRKNVDKETLYVVYEANGSIEFQDLSRHLPVIKSYNGGGGSGGGGSDKTHTCPPCPAPELLGGPSVFLFPPKPKDTLMISRTPEVTCVVVDVSHEDPEVKFNWYVDGVEVHNAKTKPREEQYNSTYRVVSVLTVLHQDWLNGKEYKCKVSNKALPAPIEKTISKAKGQPREPQVYTLPPSREEMTKNQVSLTCLVKGFYPSDIAVEWESNGQPENNYKTTPPVLDSDGSFFLYSKLTVDKSRWQQGNVFSCSVMHEALHNHYTQKSLSLSPGKGGGGSGGGGSGGGGSEVQLVESGGGLVQPGGSLRLSCAASGFNIKDTYIHWVRQAPGKGLEWVARIYPTNGYTRYADSVKGRFTISADTSKNTAYLQMNSLRAEDTAVYYCSRWGGDGFYAMDYWGQGTLVTVSSGGGGSGGGGSGGGGSDIQMTQSPSSLSASVGDRVTITCRASQDVNTAVAWYQQKPGKAPKLLIYSASFLYSGVPSRFSGSRSGTDFTLTISSLQPEDFATYYCQQHYTTPPTFGQGTKVEIK

SEQ ID NO: 111 - protein, 611 aa, Artificial Sequence
  Description of Artificial Sequence: Synthetic polypeptide
ASLPYLQKESVFQSGAHAYRIPALLYLPGQQSLLAFAEQRASKKDEHAELIVLRRGDYDAPTHQVQWQAQEVVAQARLDGHRSMNPCPLYDAQTGTLFLFFIAIPGQVTEQQQLQTRANVTRLCQVTSTDHGRTWSSPRDLTDAAIGPAYREWSTFAVGPGHCLQLHDRARSLVVPAYAYRKLHPKQRPIPSAFCFLSHDHGRTWARGHFVAQDTLECQVAEVETGEQRVVTLNARSHLRARVQAQSTNDGLDFQESQLVKKLVEPPPQGCQGSVISFPSPRSGPGSPAQWLLYTHPTHSWQRADLGAYLNPRPPAPEAWSEPVLLAKGSCAYSDLQSMGTGPDGSPLFGCLYEANDYEEIVFLMFTLKQAFPAEYLPQEPKSSDKTHTCPPCPAPELLGGPSVFLFPPKPKDTLMISRTPEVTCVVVDVSHEDPEVKFNWYVDGVEVHNAKTKPREEQYNSTYRVVSVLTVLHQDWLNGKEYKCKVSNKALPAPIEKTISKAKGQPREPQVYTLPPSREEMTKNQVSLTCLVKGFYPSDIAVEWESNGQPENNYKTTPPVLDSDGSFFLTSKLTVDKSRWQQGNVFSCSVMHEALHNHYTQKSLSLSPGK

SEQ ID NO: 112 - protein, 611 aa, Artificial Sequence
  Description of Artificial Sequence: Synthetic polypeptide
ASLPYLQKESVFQSGAHAYRIPALLYLPGQQSLLAFAEQRASKKDEHAELIVLRRGDYDAPTHQVQWQAQEVVAQARLDGHRSMNPCPLYDAQTGTLFLFFIAIPGQVTEQQQLQTRANVTRLCQVTSTDHGRTWSSPRDLTDAAIGPAYREWSTFAVGPGHCLQLHDRARSLVVPAYAYRKLHPKQRPIPSAFCFLSHDHGRTWARGHFVAQDTLECQVAEVETGEQRVVTLNARSHLRARVQAQSTNDGLDFQESQLVKKLVEPPPQGCQGSVISFPSPRSGPGSPAQWLLYTHPTHSWQRADLGAYLNPRPPAPEAWSEPVLLAKGSAAYSDLQSMGTGPDGSPLFGCLYEANDYEEIVFLMFTLKQAFPAEYLPQEPKSSDKTHTCPPCPAPELLGGPSVFLFPPKPKDTLMISRTPEVTCVVVDVSHEDPEVKFNWYVDGVEVHNAKTKPREEQYNSTYRVVSVLTVLHQDWLNGKEYKCKVSNKALPAPIEKTISKAKGQPREPQVYTLPPSREEMTKNQVSLTCLVKGFYPSDIAVEWESNGQPENNYKTTPPVLDSDGSFFLTSKLTVDKSRWQQGNVFSCSVMHEALHNHYTQKSLSLSPGK

SEQ ID NO: 113 - protein, 612 aa, Artificial Sequence
  Description of Artificial Sequence: Synthetic polypeptide
AASLPYLQKESVFQSGAHAYRIPALLYLPGQQSLLAFAEQRASKKDEHAELIVLRRGDYDAPTHQVQWQAQEVVAQARLDGHRSMNPCPLYDAQTGTLFLFFIAIPGQVTEQQQLQTRANVTRLCQVTSTDHGRTWSSPRDLTDAAIGPAYREWSTFAVGPGHCLQLHDRARSLVVPAYAYRKLHPKQRPIPSAFCFLSHDHGRTWARGHFVAQDTLECQVAEVETGEQRVVTLNARSHLRARVQAQSTNDGLDFQESQLVKKLVEPPPQGCQGSVISFPSPRSGPGSPAQWLLYTHPTHSWQRADLGAYLNPRPPAPEAWSEPVLLAKGSAAYSDLQSMGTGPDGSPLFGCLYEANDYEEIVFLMFTLKQAFPAEYLPQEPKSSDKTHTCPPCPAPELLGGPSVFLFPPKPKDTLMISRTPEVTCVVVDVSHEDPEVKFNWYVDGVEVHNAKTKPREEQYNSTYRVVSVLTVLHQDWLNGKEYKCKVSNKALPAPIEKTISKAKGQPREPQVYTLPPSREEMTKNQVSLTCLVKGFYPSDIAVEWESNGQPENNYKTTPPVLDSDGSFFLTSKLTVDKSRWQQGNVFSCSVMHEALHNHYTQKSLSLSPGK

SEQ ID NO: 114 - protein, 612 aa, Artificial Sequence
  Description of Artificial Sequence: Synthetic polypeptide
DASLPYLQKESVFQSGAHAYRIPALLYLPGQQSLLAFAEQRASKKDEHAELIVLRRGDYDAPTHQVQWQAQEVVAQARLDGHRSMNPCPLYDAQTGTLFLFFIAIPGQVTEQQQLQTRANVTRLCQVTSTDHGRTWSSPRDLTDAAIGPAYREWSTFAVGPGHCLQLHDRARSLVVPAYAYRKLHPKQRPIPSAFCFLSHDHGRTWARGHFVAQDTLECQVAEVETGEQRVVTLNARSHLRARVQAQSTNDGLDFQESQLVKKLVEPPPQGCQGSVISFPSPRSGPGSPAQWLLYTHPTHSWQRADLGAYLNPRPPAPEAWSEPVLLAKGSAAYSDLQSMGTGPDGSPLFGCLYEANDYEEIVFLMFTLKQAFPAEYLPQEPKSSDKTHTCPPCPAPELLGGPSVFLFPPKPKDTLMISRTPEVTCVVVDVSHEDPEVKFNWYVDGVEVHNAKTKPREEQYNSTYRVVSVLTVLHQDWLNGKEYKCKVSNKALPAPIEKTISKAKGQPREPQVYTLPPSREEMTKNQVSLTCLVKGFYPSDIAVEWESNGQPENNYKTTPPVLDSDGSFFLTSKLTVDKSRWQQGNVFSCSVMHEALHNHYTQKSLSLSPGK

SEQ ID NO: 115 - protein, 612 aa, Artificial Sequence
  Description of Artificial Sequence: Synthetic polypeptide
AASLPYLQKESVFQSGAHAYRIPALLYLPGQQSLLAFAEQRASKKDEHAELIVLRRGDYDAPTHQVQWQAQEVVAQARLDGHRSMNPCPLYDAQTGTLFLFFIAIPGQVTEQQQLQTRANVTRLCQVTSTDHGRTWSSPRDLTDAAIGPAYREWSTFAVGPGHCLQLHDRARSLVVPAYAYRKLHPKQRPIPSAFCFLSHDHGRTWARGHFVAQDTLECQVAEVETGEQRVVTLNARSHLRARVQAQSTNDGLDFQESQLVKKLVEPPPQGCQGSVISFPSPRSGPGSPAQWLLYTHPTHSWQRADLGAYLNPRPPAPEAWSEPVLLAKGSCAYSDLQSMGTGPDGSPLFGCLYEANDYEEIVFLMFTLKQAFPAEYLPQEPKSSDKTHTCPPCPAPELLGGPSVFLFPPKPKDTLMISRTPEVTCVVVDVSHEDPEVKFNWYVDGVEVHNAKTKPREEQYNSTYRVVSVLTVLHQDWLNGKEYKCKVSNKALPAPIEKTISKAKGQPREPQVYTLPPSREEMTKNQVSLTCLVKGFYPSDIAVEWESNGQPENNYKTTPPVLDSDGSFFLTSKLTVDKSRWQQGNVFSCSVMHEALHNHYTQKSLSLSPGK

SEQ ID NO: 116 - protein, 612 aa, Artificial Sequence
  Description of Artificial Sequence: Synthetic polypeptide
DASLPYLQKESVFQSGAHAYRIPALLYLPGQQSLLAFAEQRASKKDEHAELIVLRRGDYDAPTHQVQWQAQEVVAQARLDGHRSMNPCPLYDAQTGTLFLFFIAIPGQVTEQQQLQTRANVTRLCQVTSTDHGRTWSSPRDLTDAAIGPAYREWSTFAVGPGHCLQLHDRARSLVVPAYAYRKLHPKQRPIPSAFCFLSHDHGRTWARGHFVAQDTLECQVAEVETGEQRVVTLNARSHLRARVQAQSTNDGLDFQESQLVKKLVEPPPQGCQGSVISFPSPRSGPGSPAQWLLYTHPTHSWQRADLGAYLNPRPPAPEAWSEPVLLAKGSCAYSDLQSMGTGPDGSPLFGCLYEANDYEEIVFLMFTLKQAFPAEYLPQEPKSSDKTHTCPPCPAPELLGGPSVFLFPPKPKDTLMISRTPEVTCVVVDVSHEDPEVKFNWYVDGVEVHNAKTKPREEQYNSTYRVVSVLTVLHQDWLNGKEYKCKVSNKALPAPIEKTISKAKGQPREPQVYTLPPSREEMTKNQVSLTCLVKGFYPSDIAVEWESNGQPENNYKTTPPVLDSDGSFFLTSKLTVDKSRWQQGNVFSCSVMHEALHNHYTQKSLSLSPGK

SEQ ID NO: 117 - protein, 612 aa, Artificial Sequence
  Description of Artificial Sequence: Synthetic polypeptide
MASLPYLQKESVFQSGAHAYRIPALLYLPGQQSLLAFAEQRASKKDEHAELIVLRRGDYDAPTHQVQWQAQEVVAQARLDGHRSMNPCPLYDAQTGTLFLFFIAIPGQVTEQQQLQTRANVTRLCQVTSTDHGRTWSSPRDLTDAAIGPAYREWSTFAVGPGHCLQLHDRARSLVVPAYAYRKLHPKQRPIPSAFCFLSHDHGRTWARGHFVAQDTLECQVAEVETGEQRVVTLNARSHLRARVQAQSTNDGLDFQESQLVKKLVEPPPQGCQGSVISFPSPRSGPGSPAQWLLYTHPTHSWQRADLGAYLNPRPPAPEAWSEPVLLAKGSCAYSDLQSMGTGPDGSPLFGCLYEANDYEEIVFLMFTLKQAFPAEYLPQEPKSSDKTHTCPPCPAPELLGGPSVFLFPPKPKDTLMISRTPEVTCVVVDVSHEDPEVKFNWYVDGVEVHNAKTKPREEQYNSTYRVVSVLTVLHQDWLNGKEYKCKVSNKALPAPIEKTISKAKGQPREPQVYTLPPSREEMTKNQVSLTCLVKGFYPSDIAVEWESNGQPENNYKTTPPVLDSDGSFFLTSKLTVDKSRWQQGNVFSCSVMHEALHNHYTQKSLSLSPGK

SEQ ID NO: 118 - protein, 612 aa, Artificial Sequence
  Description of Artificial Sequence: Synthetic polypeptide
MASLPYLQKESVFQSGAHAYRIPALLYLPGQQSLLAFAEQRASKKDEHAELIVLRRGDYDAPTHQVQWQAQEVVAQARLDGHRSMNPCPLYDAQTGTLFLFFIAIPGQVTEQQQLQTRANVTRLCQVTSTDHGRTWSSPRDLTDAAIGPAYREWSTFAVGPGHCLQLHDRARSLVVPAYAYRKLHPKQRPIPSAFCFLSHDHGRTWARGHFVAQDTLECQVAEVETGEQRVVTLNARSHLRARVQAQSTNDGLDFQESQLVKKLVEPPPQGCQGSVISFPSPRSGPGSPAQWLLYTHPTHSWQRADLGAYLNPRPPAPEAWSEPVLLAKGSAAYSDLQSMGTGPDGSPLFGCLYEANDYEEIVFLMFTLKQAFPAEYLPQEPKSSDKTHTCPPCPAPELLGGPSVFLFPPKPKDTLMISRTPEVTCVVVDVSHEDPEVKFNWYVDGVEVHNAKTKPREEQYNSTYRVVSVLTVLHQDWLNGKEYKCKVSNKALPAPIEKTISKAKGQPREPQVYTLPPSREEMTKNQVSLTCLVKGFYPSDIAVEWESNGQPENNYKTTPPVLDSDGSFFLTSKLTVDKSRWQQGNVFSCSVMHEALHNHYTQKSLSLSPGK

SEQ ID NO: 119 - protein, 612 aa, Artificial Sequence
  Description of Artificial Sequence: Synthetic polypeptide
DASLPYLQKESVFQSGAHAYRIPALLYLPGQQSLLAFAEQRASKKDEHAELIVLRRGDYDAGTHQVQWQAQEVVAQARLDGHRSMNPCPLYDEQTGTLFLFFIAIPGQVTEQQQLQTRANVTRLCQVTSTDHGRTWSSPRDLTDAAIGPAYREWSTFAVGPGHCLQLHDRARSLVVPAYAYRKLHPKQRPIPSAFCFLSHDHGRTWARGHFVAQDTLECQVAEVETGEQRVVTLNARSHLRARVQAQSTNDGLDFQESQLVKKLVEPPPQGCQGSVISFPSPRSGPGSPAQWLLYTHPTHSWQRADLGAYLNPRPPAPEAWSEPVLLAKGSAAYSDLQSMGTGPDGSPLFGCLYEANDYEEIVFLMFTLKQAFPAEYLPQEPKSSDKTHTCPPCPAPELLGGPSVFLFPPKPKDTLMISRTPEVTCVVVDVSHEDPEVKFNWYVDGVEVHNAKTKPREEQYNSTYRVVSVLTVLHQDWLNGKEYKCKVSNKALPAPIEKTISKAKGQPREPQVYTLPPSREEMTKNQVSLTCLVKGFYPSDIAVEWESNGQPENNYKTTPPVLDSDGSFFLTSKLTVDKSRWQQGNVFSCSVMHEALHNHYTQKSLSLSPGK

SEQ ID NO: 120 - protein, 612 aa, Artificial Sequence
  Description of Artificial Sequence: Synthetic polypeptide
DASLPYLQDESVFQSGAHAYRIPALLYLPGQQSLLAFAEQRASKKDEHAELIVLRRGDYDAPTHQVQWQAQEVVAQARLDGHRSMNPCPLYDEQTGTLFLFFIAIPGQVTEQQQLQTRANVTRLCQVTSTDHGRTWSSPRDLTDAAIGPAYREWSTFAVGPGHCLQLHDRARSLVVPAYAYRKLHPKQRPIPSAFCFLSHDHGRTWARGHFVAQDTLECQVAEVETGEQRVVTLNARSHLRARVQAQSTNDGLDFQESQLVKKLVEPPPQGCQGSVISFPSPRSGPGSPAQWLLYTHPTHSWQRADLGAYLNPRPPAPEAWSEPVLLAKGSAAYSDLQSMGTGPDGSPLFGCLYEANDYEEIRFIMFTLKQAFPAEYLPQEPKSSDKTHTCPPCPAPELLGGPSVFLFPPKPKDTLMISRTPEVTCVVVDVSHEDPEVKFNWYVDGVEVHNAKTKPREEQYNSTYRVVSVLTVLHQDWLNGKEYKCKVSNKALPAPIEKTISKAKGQPREPQVYTLPPSREEMTKNQVSLTCLVKGFYPSDIAVEWESNGQPENNYKTTPPVLDSDGSFFLTSKLTVDKSRWQQGNVFSCSVMHEALHNHYTQKSLSLSPGK

SEQ ID NO: 121 - protein, 612 aa, Artificial Sequence
  Description of Artificial Sequence: Synthetic polypeptide
DASLPYLQKESVFQSGAHAYRIPALLYLPGQQSLLAFAEQRASKKDEHAELIVLRRGDYDANTHQVQWQAQEVVAQARLDGHRSMNPCPLYDAQTGTLFLFFIAIPGQVTEQQQLQTRANVTRLCQVTSTDHGRTWSSPRDLTDAAIGPAYREWSTFAVGPGHCLQLHDRARSLVVPAYAYRKLHPKQRPIPSAFCFLSHDHGRTWARGHFVAQDTLECQVAEVETGEQRVVTLNARSHLRARVQAQSTNDGLDFQESQLVKKLVEPPPQGCQGSVISFPSPRSGPGSPAQWLLYTHPTHSWQRADLGAYLNPRPPAPEAWSEPVLLAKGSAAYSDLQSMGTGPDGSPLFGCLYEANDYEEIVFLMFTLKQAFPAEYLPQEPKSSDKTHTCPPCPAPELLGGPSVFLFPPKPKDTLMISRTPEVTCVVVDVSHEDPEVKFNWYVDGVEVHNAKTKPREEQYNSTYRVVSVLTVLHQDWLNGKEYKCKVSNKALPAPIEKTISKAKGQPREPQVYTLPPSREEMTKNQVSLTCLVKGFYPSDIAVEWESNGQPENNYKTTPPVLDSDGSFFLTSKLTVDKSRWQQGNVFSCSVMHEALHNHYTQKSLSLSPGK

SEQ ID NO: 122 - protein, 612 aa, Artificial Sequence
  Description of Artificial Sequence: Synthetic polypeptide
DASLPYLQKESVFQSGAHAYRIPALLYLPGQQSLLAFAEQRASKKDEHAELIVLRRGDYDAPTHQVQWQAQEVVAQARLDGHRSMNPCPLYDAQTGTLFLFFIAIPGQVTEQQQLQTRANVTRLCQVTSTDHGRTWSSPRDLTDAAIGPAYREWSTFAVGPGHCLQLHDRARSLVVPAYAYRKLHPKQRPIPSAFCFLSHDHGRTWARGHFVAQDTLECQVAEVETGEQRVVTLNARSHLRARVQAQSTNDGLDFQESQLVKKLVEPPPAGCQGSVISFPSPRSGPGSPAQWLLYTHPTHRKQRADLGAYLNPRPPAPEAWSEPVLLAKGSAAYSDLQSMGTGPDGSPLFGCLYEANDYEEIVFLMFTLKQAFPAEYLPQEPKSSDKTHTCPPCPAPELLGGPSVFLFPPKPKDTLMISRTPEVTCVVVDVSHEDPEVKFNWYVDGVEVHNAKTKPREEQYNSTYRVVSVLTVLHQDWLNGKEYKCKVSNKALPAPIEKTISKAKGQPREPQVYTLPPSREEMTKNQVSLTCLVKGFYPSDIAVEWESNGQPENNYKTTPPVLDSDGSFFLTSKLTVDKSRWQQGNVFSCSVMHEALHNHYTQKSLSLSPGK

SEQ ID NO: 123 - protein, 612 aa, Artificial Sequence
  Description of Artificial Sequence: Synthetic polypeptide
DASLPYLQKESVFQSGAHAYRIPALLYLPGQQSLLAFAEQRASKKDEHAELIVLRRGDYDASTHQVQWQAQEVVAQARLDGHRSMNPCPLYDAQTGTLFLFFIAIPGQVTEQQQLQTRANVTRLCQVTSTDHGRTWSSPRDLTDAAIGPAYREWSTFAVGPGHCLQLHDRARSLVVPAYAYRKLHPKQRPIPSAFCFLSHDHGRTWARGHFVAQDTLECQVAEVETGEQRVVTLNARSHLRARVQAQSTNDGLDFQESQLVKKLVEPPPAGCQGSVISFPSPRSGPGSPAQWLLYTHPTHRKQRADLGAYLNPRPPAPEAWSEPVLLAKGSAAYSDLQSMGTGPDGSPLFGCLYEANDYEEIVFLMFTLKQAFPAEYLPQEPKSSDKTHTCPPCPAPELLGGPSVFLFPPKPKDTLMISRTPEVTCVVVDVSHEDPEVKFNWYVDGVEVHNAKTKPREEQYNSTYRVVSVLTVLHQDWLNGKEYKCKVSNKALPAPIEKTISKAKGQPREPQVYTLPPSREEMTKNQVSLTCLVKGFYPSDIAVEWESNGQPENNYKTTPPVLDSDGSFFLTSKLTVDKSRWQQGNVFSCSVMHEALHNHYTQKSLSLSPGK

SEQ ID NO: 124 - protein, 612 aa, Artificial Sequence
  Description of Artificial Sequence: Synthetic polypeptide
DASLPYLQKESVFQSGAHAYRIPALLYLPGQQSLLAFAEQRASKKDEHAELIVLRRGDYDATTHQVQWQAQEVVAQARLDGHRSMNPCPLYDAQTGTLFLFFIAIPGQVTEQQQLQTRANVTRLCQVTSTDHGRTWSSPRDLTDAAIGPAYREWSTFAVGPGHCLQLHDRARSLVVPAYAYRKLHPKQRPIPSAFCFLSHDHGRTWARGHFVAQDTLECQVAEVETGEQRVVTLNARSHLRARVQAQSTNDGLDFQESQLVKKLVEPPPAGCQGSVISFPSPRSGPGSPAQWLLYTHPTHRKQRADLGAYLNPRPPAPEAWSEPVLLAKGSAAYSDLQSMGTGPDGSPLFGCLYEANDYEEIVFLMFTLKQAFPAEYLPQEPKSSDKTHTCPPCPAPELLGGPSVFLFPPKPKDTLMISRTPEVTCVVVDVSHEDPEVKFNWYVDGVEVHNAKTKPREEQYNSTYRVVSVLTVLHQDWLNGKEYKCKVSNKALPAPIEKTISKAKGQPREPQVYTLPPSREEMTKNQVSLTCLVKGFYPSDIAVEWESNGQPENNYKTTPPVLDSDGSFFLTSKLTVDKSRWQQGNVFSCSVMHEALHNHYTQKSLSLSPGK

SEQ ID NO: 125 - protein, 612 aa, Artificial Sequence
  Description of Artificial Sequence: Synthetic polypeptide
DASLPYLQKESVFQSGAHAYRIPALLYLPGQQSLLAFAEQRASKKDEHAELIVLRRGDYDANTHQVQWQAQEVVAQARLDGHRSMNPCPLYDAQTGTLFLFFIAIPGQVTEQQQLQTRANVTRLCQVTSTDHGRTWSSPRDLTDAAIGPAYREWSTFAVGPGHCLQLHDRARSLVVPAYAYRKLHPKQRPIPSAFCFLSHDHGRTWARGHFVAQDTLECQVAEVETGEQRVVTLNARSHLRARVQAQSTNDGLDFQESQLVKKLVEPPPAGCQGSVISFPSPRSGPGSPAQWLLYTHPTHRKQRADLGAYLNPRPPAPEAWSEPVLLAKGSAAYSDLQSMGTGPDGSPLFGCLYEANDYEEIVFLMFTLKQAFPAEYLPQEPKSSDKTHTCPPCPAPELLGGPSVFLFPPKPKDTLMISRTPEVTCVVVDVSHEDPEVKFNWYVDGVEVHNAKTKPREEQYNSTYRVVSVLTVLHQDWLNGKEYKCKVSNKALPAPIEKTISKAKGQPREPQVYTLPPSREEMTKNQVSLTCLVKGFYPSDIAVEWESNGQPENNYKTTPPVLDSDGSFFLTSKLTVDKSRWQQGNVFSCSVMHEALHNHYTQKSLSLSPGK

SEQ ID NO: 126 - protein, 616 aa, Artificial Sequence
  Description of Artificial Sequence: Synthetic polypeptide
ASLPYLQKESVFQSGAHAYRIPALLYLPGQQSLLAFAEQRASKKDEHAELIVLRRGDYDAPTHQVQWQAQEVVAQARLDGHRSMNPCPLYDAQTGTLFLFFIAIPGQVTEQQQLQTRANVTRLCQVTSTDHGRTWSSPRDLTDAAIGPAYREWSTFAVGPGHCLQLHDRARSLVVPAYAYRKLHPKQRPIPSAFCFLSHDHGRTWARGHFVAQDTLECQVAEVETGEQRVVTLNARSHLRARVQAQSTNDGLDFQESQLVKKLVEPPPQGCQGSVISFPSPRSGPGSPAQWLLYTHPTHSWQRADLGAYLNPRPPAPEAWSEPVLLAKGSCAYSDLQSMGTGPDGSPLFGCLYEANDYEEIVFLMFTLKQAFPAEYLPQGGGGSGGGGSDKTHTCPPCPAPELLGGPSVFLFPPKPKDTLMISRTPEVTCVVVDVSHEDPEVKFNWYVDGVEVHNAKTKPREEQYNSTYRVVSVLTVLHQDWLNGKEYKCKVSNKALPAPIEKTISKAKGQPREPQVYTLPPSREEMTKNQVSLTCLVKGFYPSDIAVEWESNGQPENNYKTTPPVLDSDGSFFLYSKLTVDKSRWQQGNVFSCSVMHEALHNHYTQKSLSLSPGK

SEQ ID NO: 127 - protein, 616 aa, Artificial Sequence
  Description of Artificial Sequence: Synthetic polypeptide
ASLPYLQKESVFQSGAHAYRIPALLYLPGQQSLLAFAEQRASKKDEHAELIVLRRGDYDAPTHQVQWQAQEVVAQARLDGHRSMNPCPLYDAQTGTLFLFFIAIPGQVTEQQQLQTRANVTRLCQVTSTDHGRTWSSPRDLTDAAIGPAYREWSTFAVGPGHCLQLHDRARSLVVPAYAYRKLHPKQRPIPSAFCFLSHDHGRTWARGHFVAQDTLECQVAEVETGEQRVVTLNARSHLRARVQAQSTNDGLDFQESQLVKKLVEPPPQGCQGSVISFPSPRSGPGSPAQWLLYTHPTHSWQRADLGAYLNPRPPAPEAWSEPVLLAKGSAAYSDLQSMGTGPDGSPLFGCLYEANDYEEIVFLMFTLKQAFPAEYLPQGGGGSGGGGSDKTHTCPPCPAPELLGGPSVFLFPPKPKDTLMISRTPEVTCVVVDVSHEDPEVKFNWYVDGVEVHNAKTKPREEQYNSTYRVVSVLTVLHQDWLNGKEYKCKVSNKALPAPIEKTISKAKGQPREPQVYTLPPSREEMTKNQVSLTCLVKGFYPSDIAVEWESNGQPENNYKTTPPVLDSDGSFFLYSKLTVDKSRWQQGNVFSCSVMHEALHNHYTQKSLSLSPGK

SEQ ID NO: 128 - protein, 617 aa, Artificial Sequence
  Description of Artificial Sequence: Synthetic polypeptide
AASLPYLQKESVFQSGAHAYRIPALLYLPGQQSLLAFAEQRASKKDEHAELIVLRRGDYDAPTHQVQWQAQEVVAQARLDGHRSMNPCPLYDAQTGTLFLFFIAIPGQVTEQQQLQTRANVTRLCQVTSTDHGRTWSSPRDLTDAAIGPAYREWSTFAVGPGHCLQLHDRARSLVVPAYAYRKLHPKQRPIPSAFCFLSHDHGRTWARGHFVAQDTLECQVAEVETGEQRVVTLNARSHLRARVQAQSTNDGLDFQESQLVKKLVEPPPQGCQGSVISFPSPRSGPGSPAQWLLYTHPTHSWQRADLGAYLNPRPPAPEAWSEPVLLAKGSAAYSDLQSMGTGPDGSPLFGCLYEANDYEEIVFLMFTLKQAFPAEYLPQGGGGSGGGGSDKTHTCPPCPAPELLGGPSVFLFPPKPKDTLMISRTPEVTCVVVDVSHEDPEVKFNWYVDGVEVHNAKTKPREEQYNSTYRVVSVLTVLHQDWLNGKEYKCKVSNKALPAPIEKTISKAKGQPREPQVYTLPPSREEMTKNQVSLTCLVKGFYPSDIAVEWESNGQPENNYKTTPPVLDSDGSFFLYSKLTVDKSRWQQGNVFSCSVMHEALHNHYTQKSLSLSPGK

SEQ ID NO: 129 - protein, 617 aa, Artificial Sequence
  Description of Artificial Sequence: Synthetic polypeptide
DASLPYLQKESVFQSGAHAYRIPALLYLPGQQSLLAFAEQRASKKDEHAELIVLRRGDYDAPTHQVQWQAQEVVAQARLDGHRSMNPCPLYDAQTGTLFLFFIAIPGQVTEQQQLQTRANVTRLCQVTSTDHGRTWSSPRDLTDAAIGPAYREWSTFAVGPGHCLQLHDRARSLVVPAYAYRKLHPKQRPIPSAFCFLSHDHGRTWARGHFVAQDTLECQVAEVETGEQRVVTLNARSHLRARVQAQSTNDGLDFQESQLVKKLVEPPPQGCQGSVISFPSPRSGPGSPAQWLLYTHPTHSWQRADLGAYLNPRPPAPEAWSEPVLLAKGSAAYSDLQSMGTGPDGSPLFGCLYEANDYEEIVFLMFTLKQAFPAEYLPQGGGGSGGGGSDKTHTCPPCPAPELLGGPSVFLFPPKPKDTLMISRTPEVTCVVVDVSHEDPEVKFNWYVDGVEVHNAKTKPREEQYNSTYRVVSVLTVLHQDWLNGKEYKCKVSNKALPAPIEKTISKAKGQPREPQVYTLPPSREEMTKNQVSLTCLVKGFYPSDIAVEWESNGQPENNYKTTPPVLDSDGSFFLYSKLTVDKSRWQQGNVFSCSVMHEALHNHYTQKSLSLSPGK

SEQ ID NO: 130 - protein, 617 aa, Artificial Sequence
  Description of Artificial Sequence: Synthetic polypeptide
AASLPYLQKESVFQSGAHAYRIPALLYLPGQQSLLAFAEQRASKKDEHAELIVLRRGDYDAPTHQVQWQAQEVVAQARLDGHRSMNPCPLYDAQTGTLFLFFIAIPGQVTEQQQLQTRANVTRLCQVTSTDHGRTWSSPRDLTDAAIGPAYREWSTFAVGPGHCLQLHDRARSLVVPAYAYRKLHPKQRPIPSAFCFLSHDHGRTWARGHFVAQDTLECQVAEVETGEQRVVTLNARSHLRARVQAQSTNDGLDFQESQLVKKLVEPPPQGCQGSVISFPSPRSGPGSPAQWLLYTHPTHSWQRADLGAYLNPRPPAPEAWSEPVLLAKGSCAYSDLQSMGTGPDGSPLFGCLYEANDYEEIVFLMFTLKQAFPAEYLPQGGGGSGGGGSDKTHTCPPCPAPELLGGPSVFLFPPKPKDTLMISRTPEVTCVVVDVSHEDPEVKFNWYVDGVEVHNAKTKPREEQYNSTYRVVSVLTVLHQDWLNGKEYKCKVSNKALPAPIEKTISKAKGQPREPQVYTLPPSREEMTKNQVSLTCLVKGFYPSDIAVEWESNGQPENNYKTTPPVLDSDGSFFLYSKLTVDKSRWQQGNVFSCSVMHEALHNHYTQKSLSLSPGK

SEQ ID NO: 131 - protein, 617 aa, Artificial Sequence
  Description of Artificial Sequence: Synthetic polypeptide
DASLPYLQKESVFQSGAHAYRIPALLYLPGQQSLLAFAEQRASKKDEHAELIVLRRGDYDAPTHQVQWQAQEVVAQARLDGHRSMNPCPLYDAQTGTLFLFFIAIPGQVTEQQQLQTRANVTRLCQVTSTDHGRTWSSPRDLTDAAIGPAYREWSTFAVGPGHCLQLHDRARSLVVPAYAYRKLHPKQRPIPSAFCFLSHDHGRTWARGHFVAQDTLECQVAEVETGEQRVVTLNARSHLRARVQAQSTNDGLDFQESQLVKKLVEPPPQGCQGSVISFPSPRSGPGSPAQWLLYTHPTHSWQRADLGAYLNPRPPAPEAWSEPVLLAKGSCAYSDLQSMGTGPDGSPLFGCLYEANDYEEIVFLMFTLKQAFPAEYLPQGGGGSGGGGSDKTHTCPPCPAPELLGGPSVFLFPPKPKDTLMISRTPEVTCVVVDVSHEDPEVKFNWYVDGVEVHNAKTKPREEQYNSTYRVVSVLTVLHQDWLNGKEYKCKVSNKALPAPIEKTISKAKGQPREPQVYTLPPSREEMTKNQVSLTCLVKGFYPSDIAVEWESNGQPENNYKTTPPVLDSDGSFFLYSKLTVDKSRWQQGNVFSCSVMHEALHNHYTQKSLSLSPGK

SEQ ID NO: 132 - protein, 617 aa, Artificial Sequence
  Description of Artificial Sequence: Synthetic polypeptide
MASLPYLQKESVFQSGAHAYRIPALLYLPGQQSLLAFAEQRASKKDEHAELIVLRRGDYDAPTHQVQWQAQEVVAQARLDGHRSMNPCPLYDAQTGTLFLFFIAIPGQVTEQQQLQTRANVTRLCQVTSTDHGRTWSSPRDLTDAAIGPAYREWSTFAVGPGHCLQLHDRARSLVVPAYAYRKLHPKQRPIPSAFCFLSHDHGRTWARGHFVAQDTLECQVAEVETGEQRVVTLNARSHLRARVQAQSTNDGLDFQESQLVKKLVEPPPQGCQGSVISFPSPRSGPGSPAQWLLYTHPTHSWQRADLGAYLNPRPPAPEAWSEPVLLAKGSCAYSDLQSMGTGPDGSPLFGCLYEANDYEEIVFLMFTLKQAFPAEYLPQGGGGSGGGGSDKTHTCPPCPAPELLGGPSVFLFPPKPKDTLMISRTPEVTCVVVDVSHEDPEVKFNWYVDGVEVHNAKTKPREEQYNSTYRVVSVLTVLHQDWLNGKEYKCKVSNKALPAPIEKTISKAKGQPREPQVYTLPPSREEMTKNQVSLTCLVKGFYPSDIAVEWESNGQPENNYKTTPPVLDSDGSFFLYSKLTVDKSRWQQGNVFSCSVMHEALHNHYTQKSLSLSPGK

SEQ ID NO: 133 - protein, 617 aa, Artificial Sequence
  Description of Artificial Sequence: Synthetic polypeptide
MASLPYLQKESVFQSGAHAYRIPALLYLPGQQSLLAFAEQRASKKDEHAELIVLRRGDYDAPTHQVQWQAQEVVAQARLDGHRSMNPCPLYDAQTGTLFLFFIAIPGQVTEQQQLQTRANVTRLCQVTSTDHGRTWSSPRDLTDAAIGPAYREWSTFAVGPGHCLQLHDRARSLVVPAYAYRKLHPKQRPIPSAFCFLSHDHGRTWARGHFVAQDTLECQVAEVETGEQRVVTLNARSHLRARVQAQSTNDGLDFQESQLVKKLVEPPPQGCQGSVISFPSPRSGPGSPAQWLLYTHPTHSWQRADLGAYLNPRPPAPEAWSEPVLLAKGSAAYSDLQSMGTGPDGSPLFGCLYEANDYEEIVFLMFTLKQAFPAEYLPQGGGGSGGGGSDKTHTCPPCPAPELLGGPSVFLFPPKPKDTLMISRTPEVTCVVVDVSHEDPEVKFNWYVDGVEVHNAKTKPREEQYNSTYRVVSVLTVLHQDWLNGKEYKCKVSNKALPAPIEKTISKAKGQPREPQVYTLPPSREEMTKNQVSLTCLVKGFYPSDIAVEWESNGQPENNYKTTPPVLDSDGSFFLYSKLTVDKSRWQQGNVFSCSVMHEALHNHYTQKSLSLSPGK

SEQ ID NO: 134 - protein, 617 aa, Artificial Sequence
  Description of Artificial Sequence: Synthetic polypeptide
DASLPYLQKESVFQSGAHAYRIPALLYLPGQQSLLAFAEQRASKKDEHAELIVLRRGDYDAGTHQVQWQAQEVVAQARLDGHRSMNPCPLYDEQTGTLFLFFIAIPGQVTEQQQLQTRANVTRLCQVTSTDHGRTWSSPRDLTDAAIGPAYREWSTFAVGPGHCLQLHDRARSLVVPAYAYRKLHPKQRPIPSAFCFLSHDHGRTWARGHFVAQDTLECQVAEVETGEQRVVTLNARSHLRARVQAQSTNDGLDFQESQLVKKLVEPPPQGCQGSVISFPSPRSGPGSPAQWLLYTHPTHSWQRADLGAYLNPRPPAPEAWSEPVLLAKGSAAYSDLQSMGTGPDGSPLFGCLYEANDYEEIVFLMFTLKQAFPAEYLPQGGGGSGGGGSDKTHTCPPCPAPELLGGPSVFLFPPKPKDTLMISRTPEVTCVVVDVSHEDPEVKFNWYVDGVEVHNAKTKPREEQYNSTYRVVSVLTVLHQDWLNGKEYKCKVSNKALPAPIEKTISKAKGQPREPQVYTLPPSREEMTKNQVSLTCLVKGFYPSDIAVEWESNGQPENNYKTTPPVLDSDGSFFLYSKLTVDKSRWQQGNVFSCSVMHEALHNHYTQKSLSLSPGK

SEQ ID NO: 135 - protein, 617 aa, Artificial Sequence
  Description of Artificial Sequence: Synthetic polypeptide
DASLPYLQDESVFQSGAHAYRIPALLYLPGQQSLLAFAEQRASKKDEHAELIVLRRGDYDAPTHQVQWQAQEVVAQARLDGHRSMNPCPLYDEQTGTLFLFFIAIPGQVTEQQQLQTRANVTRLCQVTSTDHGRTWSSPRDLTDAAIGPAYREWSTFAVGPGHCLQLHDRARSLVVPAYAYRKLHPKQRPIPSAFCFLSHDHGRTWARGHFVAQDTLECQVAEVETGEQRVVTLNARSHLRARVQAQSTNDGLDFQESQLVKKLVEPPPQGCQGSVISFPSPRSGPGSPAQWLLYTHPTHSWQRADLGAYLNPRPPAPEAWSEPVLLAKGSAAYSDLQSMGTGPDGSPLFGCLYEANDYEEIRFIMFTLKQAFPAEYLPQGGGGSGGGGSDKTHTCPPCPAPELLGGPSVFLFPPKPKDTLMISRTPEVTCVVVDVSHEDPEVKFNWYVDGVEVHNAKTKPREEQYNSTYRVVSVLTVLHQDWLNGKEYKCKVSNKALPAPIEKTISKAKGQPREPQVYTLPPSREEMTKNQVSLTCLVKGFYPSDIAVEWESNGQPENNYKTTPPVLDSDGSFFLYSKLTVDKSRWQQGNVFSCSVMHEALHNHYTQKSLSLSPGK

SEQ ID NO: 136 - protein, 617 aa, Artificial Sequence
  Description of Artificial Sequence: Synthetic polypeptide
DASLPYLQKESVFQSGAHAYRIPALLYLPGQQSLLAFAEQRASKKDEHAELIVLRRGDYDANTHQVQWQAQEVVAQARLDGHRSMNPCPLYDAQTGTLFLFFIAIPGQVTEQQQLQTRANVTRLCQVTSTDHGRTWSSPRDLTDAAIGPAYREWSTFAVGPGHCLQLHDRARSLVVPAYAYRKLHPKQRPIPSAFCFLSHDHGRTWARGHFVAQDTLECQVAEVETGEQRVVTLNARSHLRARVQAQSTNDGLDFQESQLVKKLVEPPPQGCQGSVISFPSPRSGPGSPAQWLLYTHPTHSWQRADLGAYLNPRPPAPEAWSEPVLLAKGSAAYSDLQSMGTGPDGSPLFGCLYEANDYEEIVFLMFTLKQAFPAEYLPQGGGGSGGGGSDKTHTCPPCPAPELLGGPSVFLFPPKPKDTLMISRTPEVTCVVVDVSHEDPEVKFNWYVDGVEVHNAKTKPREEQYNSTYRVVSVLTVLHQDWLNGKEYKCKVSNKALPAPIEKTISKAKGQPREPQVYTLPPSREEMTKNQVSLTCLVKGFYPSDIAVEWESNGQPENNYKTTPPVLDSDGSFFLYSKLTVDKSRWQQGNVFSCSVMHEALHNHYTQKSLSLSPGK

SEQ ID NO: 137 - protein, 617 aa, Artificial Sequence
  Description of Artificial Sequence: Synthetic polypeptide
DASLPYLQKESVFQSGAHAYRIPALLYLPGQQSLLAFAEQRASKKDEHAELIVLRRGDYDAPTHQVQWQAQEVVAQARLDGHRSMNPCPLYDAQTGTLFLFFIAIPGQVTEQQQLQTRANVTRLCQVTSTDHGRTWSSPRDLTDAAIGPAYREWSTFAVGPGHCLQLHDRARSLVVPAYAYRKLHPKQRPIPSAFCFLSHDHGRTWARGHFVAQDTLECQVAEVETGEQRVVTLNARSHLRARVQAQSTNDGLDFQESQLVKKLVEPPPAGCQGSVISFPSPRSGPGSPAQWLLYTHPTHRKQRADLGAYLNPRPPAPEAWSEPVLLAKGSAAYSDLQSMGTGPDGSPLFGCLYEANDYEEIVFLMFTLKQAFPAEYLPQGGGGSGGGGSDKTHTCPPCPAPELLGGPSVFLFPPKPKDTLMISRTPEVTCVVVDVSHEDPEVKFNWYVDGVEVHNAKTKPREEQYNSTYRVVSVLTVLHQDWLNGKEYKCKVSNKALPAPIEKTISKAKGQPREPQVYTLPPSREEMTKNQVSLTCLVKGFYPSDIAVEWESNGQPENNYKTTPPVLDSDGSFFLYSKLTVDKSRWQQGNVFSCSVMHEALHNHYTQKSLSLSPGK

SEQ ID NO: 138 - protein, 617 aa, Artificial Sequence
  Description of Artificial Sequence: Synthetic polypeptide
DASLPYLQKESVFQSGAHAYRIPALLYLPGQQSLLAFAEQRASKKDEHAELIVLRRGDYDASTHQVQWQAQEVVAQARLDGHRSMNPCPLYDAQTGTLFLFFIAIPGQVTEQQQLQTRANVTRLCQVTSTDHGRTWSSPRDLTDAAIGPAYREWSTFAVGPGHCLQLHDRARSLVVPAYAYRKLHPKQRPIPSAFCFLSHDHGRTWARGHFVAQDTLECQVAEVETGEQRVVTLNARSHLRARVQAQSTNDGLDFQESQLVKKLVEPPPAGCQGSVISFPSPRSGPGSPAQWLLYTHPTHRKQRADLGAYLNPRPPAPEAWSEPVLLAKGSAAYSDLQSMGTGPDGSPLFGCLYEANDYEEIVFLMFTLKQAFPAEYLPQGGGGSGGGGSDKTHTCPPCPAPELLGGPSVFLFPPKPKDTLMISRTPEVTCVVVDVSHEDPEVKFNWYVDGVEVHNAKTKPREEQYNSTYRVVSVLTVLHQDWLNGKEYKCKVSNKALPAPIEKTISKAKGQPREPQVYTLPPSREEMTKNQVSLTCLVKGFYPSDIAVEWESNGQPENNYKTTPPVLDSDGSFFLYSKLTVDKSRWQQGNVFSCSVMHEALHNHYTQKSLSLSPGK

SEQ ID NO: 139 - protein, 617 aa, Artificial Sequence
  Description of Artificial Sequence: Synthetic polypeptide
DASLPYLQKESVFQSGAHAYRIPALLYLPGQQSLLAFAEQRASKKDEHAELIVLRRGDYDATTHQVQWQAQEVVAQARLDGHRSMNPCPLYDAQTGTLFLFFIAIPGQVTEQQQLQTRANVTRLCQVTSTDHGRTWSSPRDLTDAAIGPAYREWSTFAVGPGHCLQLHDRARSLVVPAYAYRKLHPKQRPIPSAFCFLSHDHGRTWARGHFVAQDTLECQVAEVETGEQRVVTLNARSHLRARVQAQSTNDGLDFQESQLVKKLVEPPPAGCQGSVISFPSPRSGPGSPAQWLLYTHPTHRKQRADLGAYLNPRPPAPEAWSEPVLLAKGSAAYSDLQSMGTGPDGSPLFGCLYEANDYEEIVFLMFTLKQAFPAEYLPQGGGGSGGGGSDKTHTCPPCPAPELLGGPSVFLFPPKPKDTLMISRTPEVTCVVVDVSHEDPEVKFNWYVDGVEVHNAKTKPREEQYNSTYRVVSVLTVLHQDWLNGKEYKCKVSNKALPAPIEKTISKAKGQPREPQVYTLPPSREEMTKNQVSLTCLVKGFYPSDIAVEWESNGQPENNYKTTPPVLDSDGSFFLYSKLTVDKSRWQQGNVFSCSVMHEALHNHYTQKSLSLSPGK

SEQ ID NO: 140 - protein, 617 aa, Artificial Sequence
  Description of Artificial Sequence: Synthetic polypeptide
DASLPYLQKESVFQSGAHAYRIPALLYLPGQQSLLAFAEQRASKKDEHAELIVLRRGDYDANTHQVQWQAQEVVAQARLDGHRSMNPCPLYDAQTGTLFLFFIAIPGQVTEQQQLQTRANVTRLCQVTSTDHGRTWSSPRDLTDAAIGPAYREWSTFAVGPGHCLQLHDRARSLVVPAYAYRKLHPKQRPIPSAFCFLSHDHGRTWARGHFVAQDTLECQVAEVETGEQRVVTLNARSHLRARVQAQSTNDGLDFQESQLVKKLVEPPPAGCQGSVISFPSPRSGPGSPAQWLLYTHPTHRKQRADLGAYLNPRPPAPEAWSEPVLLAKGSAAYSDLQSMGTGPDGSPLFGCLYEANDYEEIVFLMFTLKQAFPAEYLPQGGGGSGGGGSDKTHTCPPCPAPELLGGPSVFLFPPKPKDTLMISRTPEVTCVVVDVSHEDPEVKFNWYVDGVEVHNAKTKPREEQYNSTYRVVSVLTVLHQDWLNGKEYKCKVSNKALPAPIEKTISKAKGQPREPQVYTLPPSREEMTKNQVSLTCLVKGFYPSDIAVEWESNGQPENNYKTTPPVLDSDGSFFLYSKLTVDKSRWQQGNVFSCSVMHEALHNHYTQKSLSLSPGK

SEQ ID NO: 141 - protein, 611 aa, Artificial Sequence
  Description of Artificial Sequence: Synthetic polypeptide
ASLPYLQKESVFQSGAHAYRIPALLYLPGQQSLLAFAEQRASKKDEHAELIVLRRGDYDAPTHQVQWQAQEVVAQARLDGHRSMNPCPLYDAQTGTLFLFFIAIPGQVTEQQQLQTRANVTRLCQVTSTDHGRTWSSPRDLTDAAIGPAYREWSTFAVGPGHCLQLHDRARSLVVPAYAYRKLHPKQRPIPSAFCFLSHDHGRTWARGHFVAQDTLECQVAEVETGEQRVVTLNARSHLRARVQAQSTNDGLDFQESQLVKKLVEPPPQGCQGSVISFPSPRSGPGSPAQWLLYTHPTHSWQRADLGAYLNPRPPAPEAWSEPVLLAKGSCAYSDLQSMGTGPDGSPLFGCLYEANDYEEIVFLMFTLKQAFPAEYLPQEPKSSDKTHTCPPCPAPELLGGPSVFLFPPKPKDTLMISRTPEVTCVVVDVSHEDPEVKFNWYVDGVEVHNAKTKPREEQYNSTYRVVSVLTVLHQDWLNGKEYKCKVSNKALPAPIEKTISKAKGQPREPQVYTLPPSREEMTKNQVSLTCLVKGFYPSDIAVEWESNGQPENNYKTTPPVLDSDGSFFLYSKLTVDKSRWQQGNVFSCSVMHEALHNHYTQKSLSLSPGK

SEQ ID NO: 142 - protein, 611 aa, Artificial Sequence
  Description of Artificial Sequence: Synthetic polypeptide
ASLPYLQKESVFQSGAHAYRIPALLYLPGQQSLLAFAEQRASKKDEHAELIVLRRGDYDAPTHQVQWQAQEVVAQARLDGHRSMNPCPLYDAQTGTLFLFFIAIPGQVTEQQQLQTRANVTRLCQVTSTDHGRTWSSPRDLTDAAIGPAYREWSTFAVGPGHCLQLHDRARSLVVPAYAYRKLHPKQRPIPSAFCFLSHDHGRTWARGHFVAQDTLECQVAEVETGEQRVVTLNARSHLRARVQAQSTNDGLDFQESQLVKKLVEPPPQGCQGSVISFPSPRSGPGSPAQWLLYTHPTHSWQRADLGAYLNPRPPAPEAWSEPVLLAKGSAAYSDLQSMGTGPDGSPLFGCLYEANDYEEIVFLMFTLKQAFPAEYLPQEPKSSDKTHTCPPCPAPELLGGPSVFLFPPKPKDTLMISRTPEVTCVVVDVSHEDPEVKFNWYVDGVEVHNAKTKPREEQYNSTYRVVSVLTVLHQDWLNGKEYKCKVSNKALPAPIEKTISKAKGQPREPQVYTLPPSREEMTKNQVSLTCLVKGFYPSDIAVEWESNGQPENNYKTTPPVLDSDGSFFLYSKLTVDKSRWQQGNVFSCSVMHEALHNHYTQKSLSLSPGK

SEQ ID NO: 143 - protein, 612 aa, Artificial Sequence
  Description of Artificial Sequence: Synthetic polypeptide
AASLPYLQKESVFQSGAHAYRIPALLYLPGQQSLLAFAEQRASKKDEHAELIVLRRGDYDAPTHQVQWQAQEVVAQARLDGHRSMNPCPLYDAQTGTLFLFFIAIPGQVTEQQQLQTRANVTRLCQVTSTDHGRTWSSPRDLTDAAIGPAYREWSTFAVGPGHCLQLHDRARSLVVPAYAYRKLHPKQRPIPSAFCFLSHDHGRTWARGHFVAQDTLECQVAEVETGEQRVVTLNARSHLRARVQAQSTNDGLDFQESQLVKKLVEPPPQGCQGSVISFPSPRSGPGSPAQWLLYTHPTHSWQRADLGAYLNPRPPAPEAWSEPVLLAKGSAAYSDLQSMGTGPDGSPLFGCLYEANDYEEIVFLMFTLKQAFPAEYLPQEPKSSDKTHTCPPCPAPELLGGPSVFLFPPKPKDTLMISRTPEVTCVVVDVSHEDPEVKFNWYVDGVEVHNAKTKPREEQYNSTYRVVSVLTVLHQDWLNGKEYKCKVSNKALPAPIEKTISKAKGQPREPQVYTLPPSREEMTKNQVSLTCLVKGFYPSDIAVEWESNGQPENNYKTTPPVLDSDGSFFLYSKLTVDKSRWQQGNVFSCSVMHEALHNHYTQKSLSLSPGK

SEQ ID NO: 144 - protein, 612 aa, Artificial Sequence
  Description of Artificial Sequence: Synthetic polypeptide
DASLPYLQKESVFQSGAHAYRIPALLYLPGQQSLLAFAEQRASKKDEHAELIVLRRGDYDAPTHQVQWQAQEVVAQARLDGHRSMNPCPLYDAQTGTLFLFFIAIPGQVTEQQQLQTRANVTRLCQVTSTDHGRTWSSPRDLTDAAIGPAYREWSTFAVGPGHCLQLHDRARSLVVPAYAYRKLHPKQRPIPSAFCFLSHDHGRTWARGHFVAQDTLECQVAEVETGEQRVVTLNARSHLRARVQAQSTNDGLDFQESQLVKKLVEPPPQGCQGSVISFPSPRSGPGSPAQWLLYTHPTHSWQRADLGAYLNPRPPAPEAWSEPVLLAKGSAAYSDLQSMGTGPDGSPLFGCLYEANDYEEIVFLMFTLKQAFPAEYLPQEPKSSDKTHTCPPCPAPELLGGPSVFLFPPKPKDTLMISRTPEVTCVVVDVSHEDPEVKFNWYVDGVEVHNAKTKPREEQYNSTYRVVSVLTVLHQDWLNGKEYKCKVSNKALPAPIEKTISKAKGQPREPQVYTLPPSREEMTKNQVSLTCLVKGFYPSDIAVEWESNGQPENNYKTTPPVLDSDGSFFLYSKLTVDKSRWQQGNVFSCSVMHEALHNHYTQKSLSLSPGK

SEQ ID NO: 145 - protein, 612 aa, Artificial Sequence
  Description of Artificial Sequence: Synthetic polypeptide
AASLPYLQKESVFQSGAHAYRIPALLYLPGQQSLLAFAEQRASKKDEHAELIVLRRGDYDAPTHQVQWQAQEVVAQARLDGHRSMNPCPLYDAQTGTLFLFFIAIPGQVTEQQQLQTRANVTRLCQVTSTDHGRTWSSPRDLTDAAIGPAYREWSTFAVGPGHCLQLHDRARSLVVPAYAYRKLHPKQRPIPSAFCFLSHDHGRTWARGHFVAQDTLECQVAEVETGEQRVVTLNARSHLRARVQAQSTNDGLDFQESQLVKKLVEPPPQGCQGSVISFPSPRSGPGSPAQWLLYTHPTHSWQRADLGAYLNPRPPAPEAWSEPVLLAKGSCAYSDLQSMGTGPDGSPLFGCLYEANDYEEIVFLMFTLKQAFPAEYLPQEPKSSDKTHTCPPCPAPELLGGPSVFLFPPKPKDTLMISRTPEVTCVVVDVSHEDPEVKFNWYVDGVEVHNAKTKPREEQYNSTYRVVSVLTVLHQDWLNGKEYKCKVSNKALPAPIEKTISKAKGQPREPQVYTLPPSREEMTKNQVSLTCLVKGFYPSDIAVEWESNGQPENNYKTTPPVLDSDGSFFLYSKLTVDKSRWQQGNVFSCSVMHEALHNHYTQKSLSLSPGK

SEQ ID NO: 146 - protein, 612 aa, Artificial Sequence
  Description of Artificial Sequence: Synthetic polypeptide
DASLPYLQKESVFQSGAHAYRIPALLYLPGQQSLLAFAEQRASKKDEHAELIVLRRGDYDAPTHQVQWQAQEVVAQARLDGHRSMNPCPLYDAQTGTLFLFFIAIPGQVTEQQQLQTRANVTRLCQVTSTDHGRTWSSPRDLTDAAIGPAYREWSTFAVGPGHCLQLHDRARSLVVPAYAYRKLHPKQRPIPSAFCFLSHDHGRTWARGHFVAQDTLECQVAEVETGEQRVVTLNARSHLRARVQAQSTNDGLDFQESQLVKKLVEPPPQGCQGSVISFPSPRSGPGSPAQWLLYTHPTHSWQRADLGAYLNPRPPAPEAWSEPVLLAKGSCAYSDLQSMGTGPDGSPLFGCLYEANDYEEIVFLMFTLKQAFPAEYLPQEPKSSDKTHTCPPCPAPELLGGPSVFLFPPKPKDTLMISRTPEVTCVVVDVSHEDPEVKFNWYVDGVEVHNAKTKPREEQYNSTYRVVSVLTVLHQDWLNGKEYKCKVSNKALPAPIEKTISKAKGQPREPQVYTLPPSREEMTKNQVSLTCLVKGFYPSDIAVEWESNGQPENNYKTTPPVLDSDGSFFLYSKLTVDKSRWQQGNVFSCSVMHEALHNHYTQKSLSLSPGK

SEQ ID NO: 147 - protein, 612 aa, Artificial Sequence
  Description of Artificial Sequence: Synthetic polypeptide
MASLPYLQKESVFQSGAHAYRIPALLYLPGQQSLLAFAEQRASKKDEHAELIVLRRGDYDAPTHQVQWQAQEVVAQARLDGHRSMNPCPLYDAQTGTLFLFFIAIPGQVTEQQQLQTRANVTRLCQVTSTDHGRTWSSPRDLTDAAIGPAYREWSTFAVGPGHCLQLHDRARSLVVPAYAYRKLHPKQRPIPSAFCFLSHDHGRTWARGHFVAQDTLECQVAEVETGEQRVVTLNARSHLRARVQAQSTNDGLDFQESQLVKKLVEPPPQGCQGSVISFPSPRSGPGSPAQWLLYTHPTHSWQRADLGAYLNPRPPAPEAWSEPVLLAKGSCAYSDLQSMGTGPDGSPLFGCLYEANDYEEIVFLMFTLKQAFPAEYLPQEPKSSDKTHTCPPCPAPELLGGPSVFLFPPKPKDTLMISRTPEVTCVVVDVSHEDPEVKFNWYVDGVEVHNAKTKPREEQYNSTYRVVSVLTVLHQDWLNGKEYKCKVSNKALPAPIEKTISKAKGQPREPQVYTLPPSREEMTKNQVSLTCLVKGFYPSDIAVEWESNGQPENNYKTTPPVLDSDGSFFLYSKLTVDKSRWQQGNVFSCSVMHEALHNHYTQKSLSLSPGK

SEQ ID NO: 148 - protein, 612 aa, Artificial Sequence
  Description of Artificial Sequence: Synthetic polypeptide
MASLPYLQKESVFQSGAHAYRIPALLYLPGQQSLLAFAEQRASKKDEHAELIVLRRGDYDAPTHQVQWQAQEVVAQARLDGHRSMNPCPLYDAQTGTLFLFFIAIPGQVTEQQQLQTRANVTRLCQVTSTDHGRTWSSPRDLTDAAIGPAYREWSTFAVGPGHCLQLHDRARSLVVPAYAYRKLHPKQRPIPSAFCFLSHDHGRTWARGHFVAQDTLECQVAEVETGEQRVVTLNARSHLRARVQAQSTNDGLDFQESQLVKKLVEPPPQGCQGSVISFPSPRSGPGSPAQWLLYTHPTHSWQRADLGAYLNPRPPAPEAWSEPVLLAKGSAAYSDLQSMGTGPDGSPLFGCLYEANDYEEIVFLMFTLKQAFPAEYLPQEPKSSDKTHTCPPCPAPELLGGPSVFLFPPKPKDTLMISRTPEVTCVVVDVSHEDPEVKFNWYVDGVEVHNAKTKPREEQYNSTYRVVSVLTVLHQDWLNGKEYKCKVSNKALPAPIEKTISKAKGQPREPQVYTLPPSREEMTKNQVSLTCLVKGFYPSDIAVEWESNGQPENNYKTTPPVLDSDGSFFLYSKLTVDKSRWQQGNVFSCSVMHEALHNHYTQKSLSLSPGK

SEQ ID NO: 149 - protein, 612 aa, Artificial Sequence
  Description of Artificial Sequence: Synthetic polypeptide
DASLPYLQKESVFQSGAHAYRIPALLYLPGQQSLLAFAEQRASKKDEHAELIVLRRGDYDAGTHQVQWQAQEVVAQARLDGHRSMNPCPLYDEQTGTLFLFFIAIPGQVTEQQQLQTRANVTRLCQVTSTDHGRTWSSPRDLTDAAIGPAYREWSTFAVGPGHCLQLHDRARSLVVPAYAYRKLHPKQRPIPSAFCFLSHDHGRTWARGHFVAQDTLECQVAEVETGEQRVVTLNARSHLRARVQAQSTNDGLDFQESQLVKKLVEPPPQGCQGSVISFPSPRSGPGSPAQWLLYTHPTHSWQRADLGAYLNPRPPAPEAWSEPVLLAKGSAAYSDLQSMGTGPDGSPLFGCLYEANDYEEIVFLMFTLKQAFPAEYLPQEPKSSDKTHTCPPCPAPELLGGPSVFLFPPKPKDTLMISRTPEVTCVVVDVSHEDPEVKFNWYVDGVEVHNAKTKPREEQYNSTYRVVSVLTVLHQDWLNGKEYKCKVSNKALPAPIEKTISKAKGQPREPQVYTLPPSREEMTKNQVSLTCLVKGFYPSDIAVEWESNGQPENNYKTTPPVLDSDGSFFLYSKLTVDKSRWQQGNVFSCSVMHEALHNHYTQKSLSLSPGK

SEQ ID NO: 150 - protein, 612 aa, Artificial Sequence
  Description of Artificial Sequence: Synthetic polypeptide
DASLPYLQDESVFQSGAHAYRIPALLYLPGQQSLLAFAEQRASKKDEHAELIVLRRGDYDAPTHQVQWQAQEVVAQARLDGHRSMNPCPLYDEQTGTLFLFFIAIPGQVTEQQQLQTRANVTRLCQVTSTDHGRTWSSPRDLTDAAIGPAYREWSTFAVGPGHCLQLHDRARSLVVPAYAYRKLHPKQRPIPSAFCFLSHDHGRTWARGHFVAQDTLECQVAEVETGEQRVVTLNARSHLRARVQAQSTNDGLDFQESQLVKKLVEPPPQGCQGSVISFPSPRSGPGSPAQWLLYTHPTHSWQRADLGAYLNPRPPAPEAWSEPVLLAKGSAAYSDLQSMGTGPDGSPLFGCLYEANDYEEIRFIMFTLKQAFPAEYLPQEPKSSDKTHTCPPCPAPELLGGPSVFLFPPKPKDTLMISRTPEVTCVVVDVSHEDPEVKFNWYVDGVEVHNAKTKPREEQYNSTYRVVSVLTVLHQDWLNGKEYKCKVSNKALPAPIEKTISKAKGQPREPQVYTLPPSREEMTKNQVSLTCLVKGFYPSDIAVEWESNGQPENNYKTTPPVLDSDGSFFLYSKLTVDKSRWQQGNVFSCSVMHEALHNHYTQKSLSLSPGK

SEQ ID NO: 151 - protein, 612 aa, Artificial Sequence
  Description of Artificial Sequence: Synthetic polypeptide
DASLPYLQKESVFQSGAHAYRIPALLYLPGQQSLLAFAEQRASKKDEHAELIVLRRGDYDANTHQVQWQAQEVVAQARLDGHRSMNPCPLYDAQTGTLFLFFIAIPGQVTEQQQLQTRANVTRLCQVTSTDHGRTWSSPRDLTDAAIGPAYREWSTFAVGPGHCLQLHDRARSLVVPAYAYRKLHPKQRPIPSAFCFLSHDHGRTWARGHFVAQDTLECQVAEVETGEQRVVTLNARSHLRARVQAQSTNDGLDFQESQLVKKLVEPPPQGCQGSVISFPSPRSGPGSPAQWLLYTHPTHSWQRADLGAYLNPRPPAPEAWSEPVLLAKGSAAYSDLQSMGTGPDGSPLFGCLYEANDYEEIVFLMFTLKQAFPAEYLPQEPKSSDKTHTCPPCPAPELLGGPSVFLFPPKPKDTLMISRTPEVTCVVVDVSHEDPEVKFNWYVDGVEVHNAKTKPREEQYNSTYRVVSVLTVLHQDWLNGKEYKCKVSNKALPAPIEKTISKAKGQPREPQVYTLPPSREEMTKNQVSLTCLVKGFYPSDIAVEWESNGQPENNYKTTPPVLDSDGSFFLYSKLTVDKSRWQQGNVFSCSVMHEALHNHYTQKSLSLSPGK

SEQ ID NO: 152 - protein, 612 aa, Artificial Sequence
  Description of Artificial Sequence: Synthetic polypeptide
DASLPYLQKESVFQSGAHAYRIPALLYLPGQQSLLAFAEQRASKKDEHAELIVLRRGDYDAPTHQVQWQAQEVVAQARLDGHRSMNPCPLYDAQTGTLFLFFIAIPGQVTEQQQLQTRANVTRLCQVTSTDHGRTWSSPRDLTDAAIGPAYREWSTFAVGPGHCLQLHDRARSLVVPAYAYRKLHPKQRPIPSAFCFLSHDHGRTWARGHFVAQDTLECQVAEVETGEQRVVTLNARSHLRARVQAQSTNDGLDFQESQLVKKLVEPPPAGCQGSVISFPSPRSGPGSPAQWLLYTHPTHRKQRADLGAYLNPRPPAPEAWSEPVLLAKGSAAYSDLQSMGTGPDGSPLFGCLYEANDYEEIVFLMFTLKQAFPAEYLPQEPKSSDKTHTCPPCPAPELLGGPSVFLFPPKPKDTLMISRTPEVTCVVVDVSHEDPEVKFNWYVDGVEVHNAKTKPREEQYNSTYRVVSVLTVLHQDWLNGKEYKCKVSNKALPAPIEKTISKAKGQPREPQVYTLPPSREEMTKNQVSLTCLVKGFYPSDIAVEWESNGQPENNYKTTPPVLDSDGSFFLYSKLTVDKSRWQQGNVFSCSVMHEALHNHYTQKSLSLSPGK

SEQ ID NO: 153 - protein, 612 aa, Artificial Sequence
  Description of Artificial Sequence: Synthetic polypeptide
DASLPYLQKESVFQSGAHAYRIPALLYLPGQQSLLAFAEQRASKKDEHAELIVLRRGDYDASTHQVQWQAQEVVAQARLDGHRSMNPCPLYDAQTGTLFLFFIAIPGQVTEQQQLQTRANVTRLCQVTSTDHGRTWSSPRDLTDAAIGPAYREWSTFAVGPGHCLQLHDRARSLVVPAYAYRKLHPKQRPIPSAFCFLSHDHGRTWARGHFVAQDTLECQVAEVETGEQRVVTLNARSHLRARVQAQSTNDGLDFQESQLVKKLVEPPPAGCQGSVISFPSPRSGPGSPAQWLLYTHPTHRKQRADLGAYLNPRPPAPEAWSEPVLLAKGSAAYSDLQSMGTGPDGSPLFGCLYEANDYEEIVFLMFTLKQAFPAEYLPQEPKSSDKTHTCPPCPAPELLGGPSVFLFPPKPKDTLMISRTPEVTCVVVDVSHEDPEVKFNWYVDGVEVHNAKTKPREEQYNSTYRVVSVLTVLHQDWLNGKEYKCKVSNKALPAPIEKTISKAKGQPREPQVYTLPPSREEMTKNQVSLTCLVKGFYPSDIAVEWESNGQPENNYKTTPPVLDSDGSFFLYSKLTVDKSRWQQGNVFSCSVMHEALHNHYTQKSLSLSPGK

SEQ ID NO: 154 - protein, 612 aa, Artificial Sequence
  Description of Artificial Sequence: Synthetic polypeptide
DASLPYLQKESVFQSGAHAYRIPALLYLPGQQSLLAFAEQRASKKDEHAELIVLRRGDYDATTHQVQWQAQEVVAQARLDGHRSMNPCPLYDAQTGTLFLFFIAIPGQVTEQQQLQTRANVTRLCQVTSTDHGRTWSSPRDLTDAAIGPAYREWSTFAVGPGHCLQLHDRARSLVVPAYAYRKLHPKQRPIPSAFCFLSHDHGRTWARGHFVAQDTLECQVAEVETGEQRVVTLNARSHLRARVQAQSTNDGLDFQESQLVKKLVEPPPAGCQGSVISFPSPRSGPGSPAQWLLYTHPTHRKQRADLGAYLNPRPPAPEAWSEPVLLAKGSAAYSDLQSMGTGPDGSPLFGCLYEANDYEEIVFLMFTLKQAFPAEYLPQEPKSSDKTHTCPPCPAPELLGGPSVFLFPPKPKDTLMISRTPEVTCVVVDVSHEDPEVKFNWYVDGVEVHNAKTKPREEQYNSTYRVVSVLTVLHQDWLNGKEYKCKVSNKALPAPIEKTISKAKGQPREPQVYTLPPSREEMTKNQVSLTCLVKGFYPSDIAVEWESNGQPENNYKTTPPVLDSDGSFFLYSKLTVDKSRWQQGNVFSCSVMHEALHNHYTQKSLSLSPGK

SEQ ID NO: 155 - protein, 612 aa, Artificial Sequence
  Description of Artificial Sequence: Synthetic polypeptide
DASLPYLQKESVFQSGAHAYRIPALLYLPGQQSLLAFAEQRASKKDEHAELIVLRRGDYDANTHQVQWQAQEVVAQARLDGHRSMNPCPLYDAQTGTLFLFFIAIPGQVTEQQQLQTRANVTRLCQVTSTDHGRTWSSPRDLTDAAIGPAYREWSTFAVGPGHCLQLHDRARSLVVPAYAYRKLHPKQRPIPSAFCFLSHDHGRTWARGHFVAQDTLECQVAEVETGEQRVVTLNARSHLRARVQAQSTNDGLDFQESQLVKKLVEPPPAGCQGSVISFPSPRSGPGSPAQWLLYTHPTHRKQRADLGAYLNPRPPAPEAWSEPVLLAKGSAAYSDLQSMGTGPDGSPLFGCLYEANDYEEIVFLMFTLKQAFPAEYLPQEPKSSDKTHTCPPCPAPELLGGPSVFLFPPKPKDTLMISRTPEVTCVVVDVSHEDPEVKFNWYVDGVEVHNAKTKPREEQYNSTYRVVSVLTVLHQDWLNGKEYKCKVSNKALPAPIEKTISKAKGQPREPQVYTLPPSREEMTKNQVSLTCLVKGFYPSDIAVEWESNGQPENNYKTTPPVLDSDGSFFLYSKLTVDKSRWQQGNVFSCSVMHEALHNHYTQKSLSLSPGK

SEQ ID NO: 156 - DNA, 1836 bp, Artificial Sequence
  Description of Artificial Sequence: Synthetic polynucleotide
gatgcatctctgccttacctgcagaaagaaagcgtgttccagtctggcgcccacgcctacagaattcccgctctgctgtatctgccaggccagcagtctctgctggctttcgctgaacagcgggccagcaagaaggatgagcacgccgaactgatcgtgctgcggagaggcgattacgacgccggcacacatcaggtgcagtggcaggctcaagaggtggtggctcaggctagactggacggccacagatctatgaacccctgtcctctgtacgatgaacagaccggcacactgtttctgttctttatcgctatccccggccaagtgaccgagcagcagcagctgcagacaagagccaacgtgaccagactgtgtcaagtgacctccaccgaccacggcagaacctggtctagccctagagatctgaccgacgccgccatcggacctgcctatagagagtggtccaccttcgccgttggacctggacactgtctccagctgcacgacagggctagatctctggtggtgcctgcctacgcctatagaaagctgcaccccaaacagcggcctattcctagcgccttctgctttctgagccacgatcacggcaggacatgggccagaggacatttcgtggcccaggacacactggaatgccaggtggccgaagtggaaaccggcgagcagagagtcgtgaccctgaacgccagatctcacctgagagccagagtgcaggcccagagcacaaacgacggcctggatttccaagagagccagctggtcaagaaactggtggaacctcctccacagggctgtcagggaagcgtgatcagctttccatctcctagaagcggccctggctctcctgctcagtggctgctgtatacacaccccacacacagctggcagagagccgatctgggcgcctacctgaatcctagacctcctgctcctgaggcttggagcgaacctgttctgctggccaagggcagcgctgcctacagcgatctgcagtctatgggcacaggccctgatggcagccctctgtttggctgtctgtacgaggccaacgactacgaagagatcgtgttcctgatgttcaccctgaagcaggcctttccagccgagtacctgcctcaagagcccaaatcttctgacaaaactcacacatgcccaccgtgcccagcacctgaactcctggggggaccgtcagtcttcctcttccccccaaaacccaaggacaccctcatgatctcccggacccctgaggtcacatgcgtggtggtggacgtgagccacgaagaccctgaggtcaagttcaactggtacgtggacggcgtggaggtgcataatgccaagacaaagccgcgggaggagcagtacaacagcacgtaccgtgtggtcagcgtcctcaccgtcctgcaccaggactggctgaatggcaaggagtacaagtgcaaggtctccaacaaagccctcccagcccccatcgagaaaaccatctccaaagccaaagggcagccccgagaaccacaggtctacaccctgcccccatcccgggaggagatgaccaagaaccaggtcagcctgacctgcctggtcaaaggcttctatcccagcgacatcgccgtggagtgggagagcaatgggcagccggagaacaactacaagaccacgcctcccgtgctggactccgacggctccttcttcctctatagcaagctcaccgtggacaagagcaggtggcagcaggggaacgtcttctcatgctccgtgatgcatgaggctctgcacaaccactacacgcagaagagcctctccctgtctccgggtaaa

SEQ ID NO: 157 - protein, 10 aa, Artificial Sequence
  Description of Artificial Sequence: Synthetic 10xHis tag
HHHHHHHHHH

SEQ ID NO: 158 - protein, 15 aa, Artificial Sequence
  Description of Artificial Sequence: Synthetic peptide
  SITE (1)..(15): This sequence may encompass 1-5 "Gly Gly Pro" repeating units
GGPGGPGGPGGPGGP

SEQ ID NO: 159 - protein, 25 aa, Artificial Sequence
  Description of Artificial Sequence: Synthetic peptide
  SITE (1)..(25): This sequence may encompass 1-5 "Gly Gly Gly Gly Ser" repeating units
GGGGSGGGGSGGGGSGGGGSGGGGS

SEQ ID NO: 160 - protein, 10 aa, Artificial Sequence
  Description of Artificial Sequence: Synthetic peptide
GGGGSGGGGS

SEQ ID NO: 161 - DNA, 12 bp, Artificial Sequence
  Description of Artificial Sequence: Synthetic oligonucleotide
attaaaagtaaa
